(19) United States
(12) Patent Application Publication
(10) Pub. No.: US 2017/0073393 A1
(43) Pub. Date: Mar. 16, 2017

(54) FACTOR VIII CHIMERIC PROTEINS AND USES THEREOF

(71) Applicant: BIOGEN MA INC., Cambridge, MA (US)

(72) Inventors: Ekta Seth CHHABRA, Framingham, MA (US); Tongyao LIU, Lexington, MA (US)

(73) Assignee: Biogen MA Inc., Cambridge, MA (US)

(21) Appl. No.: 15/110,673

(22) PCT Filed: Jan. 9, 2015
(86) PCT No.: PCT/US15/10738

§ 371 Date: Jul. 8, 2016

Related U.S. Application Data
(60) Provisional application No. 61/926,226, filed on Jan. 10, 2014.
(60) Provisional application No. 61/988,104, filed on May 2, 2014.

(51) Int. Cl. C07K 14/755; C07K 16/00

(52) U.S. Cl. CPC C07K 14/755; C07K 16/00; C07K 2319/00; A61K 38/00

(57) ABSTRACT

The present invention provides a chimeric protein comprising a first polypeptide which comprises a FVIII protein and a first Ig constant region or a portion thereof and a second polypeptide which comprises a VWF protein comprising the D′ domain and D3 domain of VWF, a XTEN sequence having less than 288 amino acids in length, and a second Ig constant region or a portion thereof, wherein the first polypeptide and the second polypeptide are associated with each other. The invention also includes nucleotides, vectors, host cells, methods of using the chimeric proteins.

### REFERENCE TO SEQUENCE LISTING SUBMITTED ELECTRONICALLY

[0001] The content of the electronically submitted sequence listing in ASCII text file (Name: 2159_441 PC02_SequenceListing_ST25.txt; Size: 823,500 bytes; and Date of Creation: Jan. 9, 2015) is incorporated herein by reference in its entirety.

### BACKGROUND OF THE INVENTION

[0002] Haemophilia A is a bleeding disorder caused by defects in the gene encoding coagulation factor VIII (FVIII) and affects 1-2 in 10,000 male births. Graw et al., Nat. Rev. Genet. 6(6): 488-501 (2005). Patients affected with hemophilia A can be treated with infusion of purified or recombinantly produced FVIII. All commercially available FVIII products, however, are known to have a half-life of about 8-12 hours, requiring frequent intravenous administration to the patients. See Weiner M. A. and Cairo, M. S., Pediatric Hematology Secrets, Lee, M. T., 12. Disorders of Coagulation, Elsevier Health Sciences, 2001; Lillicrap, D. Thromb. Res. 122 Suppl 4:S2-8 (2008). In addition, a number of approaches have been tried in order to extend the FVIII half-life. For example, the approaches in development to extend the half-life of clotting factors include pegylation, glycopegylation, and conjugation with albumin. See Dumont et al., Blood. 119(13): 3024-3030 (Published online Jan. 13, 2012). Regardless of the protein engineering used, however, the long acting FVIII products currently under development are reported to have limited half-lives—only to about 1.5 to 2 hours in preclinical animal models. See id. Consistent results have been demonstrated in humans, for example, rFVIIIFc was reported to improve half-life up to ˜1.7 fold compared with ADVATE® in hemophilia A patients. See Id. Therefore, the half-life increases, despite minor improvements, may indicate the presence of other T1/2 limiting factors. See Liu, T. et al., 2007 ISTH meeting, abstract #P-M-035; Henrik, A. et al., 2011 ISTH meeting, abstract #P=MO-181; Liu, T. et al., 2011 ISTH meeting abstract #P-WE-131.

[0003] Plasma von Willebrand Factor (VWF) has a half-life of approximately 16 hours (ranging from 13 to 18 hours). Goudemand J, et al. J Thromb Haemost 2005; 3:2219-27. The VWF half-life may be affected by a number of factors: glycosylation pattern, ADAMTS-13 (a disintegrin and metalloprotease with thrombospondin motif-13), and various mutations in VWF.

[0004] In plasma, 95-98% of FVIII circulates in a tight non-covalent complex with full-length VWF. The formation of this complex is important for the maintenance of appropriate plasma levels of FVIII in vivo. Lenting et al., Blood. 92(11): 3983-96 (1998); Lenting et al., J. Thromb. Haemost. 5(7): 1353-60 (2007). The full-length wild-type FVIII is mostly present as a heterodimer having a heavy chain (MW 200 kD) and a light chain (MW 73 kD). When FVIII is activated due to proteolysis at positions 372 and 740 in the heavy chain and at position 1689 in the light chain, the VWF bound to FVIII is removed from the activated FVIII. The activated FVIII, together with activated factor IX, calcium, and phospholipid (“tenase complex”), induces the activation of factor X, generating large amounts of thrombin. Thrombin, in turn, then cleaves fibrinogen to form soluble fibrin monomers, which then spontaneously polymerize to form the soluble fibrin polymer. Thrombin also activates factor XIII, which, together with calcium, serves to crosslink and stabilize the soluble fibrin polymer, forming crosslinked (insoluble) fibrin. The activated FVIII is cleared fast from the circulation by proteolysis.

[0005] Due to the frequent dosing and inconvenience caused by the dosing schedule, there is still a need to develop FVIII products requiring less frequent administration, i.e., a FVIII product that has a half-life longer than the 1.5 to 2 fold half-life limitation.

### BRIEF SUMMARY OF THE INVENTION

[0006] The present invention provides a chimeric protein comprising (i) a first polypeptide which comprises a Factor VIII (“FVIII”) protein fused to a first immunoglobulin (“Ig”) constant region or a portion thereof and (ii) a second polypeptide which comprises a von Willebrand Factor (“VWF”) protein comprising a D′ domain and a D3 domain of VWF fused to a second Ig constant region or a portion thereof by an XTEN sequence in-between, wherein the XTEN sequence contains less than 288 amino acid residues and wherein the first polypeptide is linked to or associated with the second polypeptide. Certain embodiments include the chimeric protein as described herein, wherein the XTEN sequence in the second polypeptide consists of an amino acid sequence having a length of between 12 amino acids and 287 amino acids.

[0007] Also disclosed is the chimeric protein as described herein, wherein the chimeric protein exhibits a longer half-life compared to a corresponding fusion protein comprising the first polypeptide and the second polypeptide wherein the second polypeptide of the fusion protein comprises an XTEN sequence containing at least 288 amino acids. Some embodiments include the XTEN sequence AE288, containing at least 288 amino acids. In some embodiments AE288 is SEQ ID NO: 8.

[0008] Also disclosed is the chimeric protein as described herein, wherein the XTEN sequence of the second polypeptide contains about 36, about 42, about 72, or about 144 amino acids. In some embodiments the XTEN sequence of the second polypeptide is selected from AE42, AE72, AE144, AG42, AG72, or AG144.

[0009] Some embodiments include the chimeric protein as described herein, wherein the XTEN sequence of the second polypeptide is selected from SEQ ID NO: 9, SEQ ID NO: 10, SEQ ID NO: 11, SEQ ID NO: 55; SEQ ID NO: 56; SEQ ID NO: 57; SEQ ID NO: 58; SEQ ID NO: 58; SEQ ID NO: 59; SEQ ID NO: 14; SEQ ID NO: 60; SEQ ID NO: 61; SEQ ID NO: 62; or SEQ ID NO: 63.

[0010] In certain embodiments the first polypeptide further comprises a second XTEN sequence which links the FVIII protein with the first Ig constant region or a portion thereof. Also disclosed is the chimeric protein as described herein, wherein the first polypeptide comprises a third XTEN sequence which is inserted at one or more insertion sites within the FVIII protein. In some embodiments the first polypeptide further comprises a second XTEN sequence which is inserted at one or more insertion sites within the FVIII protein. In certain embodiments, the first polypeptide comprises a third XTEN sequence which links the FVIII protein with the first Ig constant region or a portion thereof.

[0011] Also disclosed is the chimeric protein as described herein, wherein the second XTEN sequence, the third XTEN sequence, or the second and third XTEN sequences are each independently selected from AE42, AE72, AE864, AE576, AE288, AE144, AG864, AG576, AG288, and AG144. In some embodiments the second XTEN sequence, the third XTEN sequence, or the second and third XTEN sequences are each independently selected from SEQ ID NO: 8; SEQ ID NO: 9, SEQ ID NO: 10, SEQ ID NO: 11, SEQ ID NO: 17; SEQ ID NO: 54; SEQ ID NO: 19; SEQ ID NO: 16; SEQ ID NO: 18; SEQ ID NO: 15; SEQ ID NO: 55; SEQ ID NO: 56; SEQ ID NO: 57; SEQ ID NO: 58; SEQ ID NO: 59; SEQ ID NO: 14; SEQ ID NO: 60; SEQ ID NO: 61; SEQ ID NO: 62; or SEQ ID NO: 63. In certain embodiments the second XTEN sequence, the third XTEN sequence, or both the second and third XTEN sequences are each independently AE288 or AG288. In some embodiments the XTEN sequence in the second polypeptide is fused to the second Ig constant region or a portion thereof by a linker. In certain embodiments the linker is a cleavable linker.

[0012] Some embodiments include the chimeric protein as described herein, wherein the linker is cleavable by a protease selected from factor XIa, factor XIIa, kallikrein, factor VIIa, factor IXa, factor Xa, factor IIa (thrombin), Elastase-2, Granzyme-B, TEV, Enterokinase, Protease 3C, Sortase A, MMP-12, MMP-13, MMP-17, and MMP-20. In some embodiments the linker is cleavable by factor IIa (thrombin).

[0013] Also disclosed is the chimeric protein as described herein, wherein the linker comprises one or more cleavage sites comprising an amino acid sequence selected from RRRR (SEQ ID NO: 102), RKRRKR (SEQ ID NO: 103), RRRRS (SEQ ID NO: 104), TQSFNDFTR (SEQ ID NO: 1), SVSQTSKLTR (SEQ ID NO: 3), DFLAEGGGVR (SEQ ID NO: 4), TTKIKPR (SEQ ID NO: 5), LVPRG (SEQ ID NO: 6), ALRPR (SEQ ID NO: 7), KLTRAET (SEQ ID NO: 121), DFTRVVG (SEQ ID NO: 122), TMTRIVGG (SEQ ID NO: 123), SPFRSTGG (SEQ ID NO: 124), LQVRIVGG (SEQ ID NO: 125), PLGRIVGG (SEQ ID NO: 126), IEGRTVGG (SEQ ID NO: 127), LTPRSLLV (SEQ ID NO: 128), LGPVSGVP (SEQ ID NO: 129), VAGDSLEE (SEQ ID NO: 130), GPAGLGGA (SEQ ID NO: 131), GPAGLRGA (SEQ ID NO: 132), APLGLRLR (SEQ ID NO: 133), PALPLVAQ (SEQ ID NO: 134), ENLYFQG (SEQ ID NO: 135), DDDKIVGG (SEQ ID NO: 136), LEVLFQGP (SEQ ID NO: 137), LPKTGSES (SEQ ID NO: 138), DKNTGDYYEDSYEDISAYLLSKNNAIEPRSFS (SEQ ID NO: 88), and IEPRSFS (SEQ ID NO: 194). In some embodiments the linker comprises TLDPRSFLLRNPNDKYEPFWEDEEK (SEQ ID NO: 146). In certain embodiments the cleavage sites comprise an amino acid sequence of LVPRG (SEQ ID NO:6). In other embodiments the cleavage site comprises an amino acid sequence of IEPRSFS (SEQ ID NO: 194). In still other embodiments the cleavage site comprises an amino acid sequence of IEPRSFS (SEQ ID NO: 194), wherein the cleavage site is not the full length a2 region of FVIII. In some embodiments, the cleavage site comprises a fragment of an a2 region of FVIII comprising at least the sequence IEPR (SEQ ID NO: 200). In other embodiments, the cleavage site comprises a fragment of an a2 region of FVIII comprising at least the sequence IEPR (SEQ ID NO: 200), wherein the cleavage site is not the full length a2 region. In certain embodiments, the cleavage site is cleavable in a thrombin cleavage assay as provided herein or as known in the art.

[0014] Some embodiments include the chimeric protein as described herein, wherein the first Ig constant region or a portion thereof comprises a first Fc region and/or the second Ig constant region or a portion thereof comprises a second Fc region. In some embodiments the first Ig constant region or a portion thereof and the second Ig constant region or a portion thereof extend the half-life of the chimeric protein. In some embodiments the first polypeptide and the second polypeptide is fused by a linker. In certain embodiments the first polypeptide and the second polypeptide is fused by a processable linker. In some embodiments the first Ig constant region or a portion thereof is associated with the second Ig constant region or a portion thereof. In certain embodiments the first Ig constant region or a portion thereof is associated with the second Ig constant region or a portion thereof by a covalent bond. In some embodiments the covalent bond is a disulfide bond.

[0015] Also disclosed is the chimeric protein comprising each of the following formulae (a)-(hh):

### (a) FVIII-F1:F2-L2-X-L1-V;

### (b) FVIII-F1:V-L1-X-L2-F2;

### (c) F1-FVIII:F2-L2-X-L1-V;

### (d) F1-FVIII:V-L1-X-L2-F2;

### (e) FVIII-X2-F1:F2-L2-X1-L1-V;

### (f) FVIII-X2-F1:V-L1-X1-L2-F2;

### (g) FVIII(X2)-F1:F2-L2-X1-L1-V;

### (h) FVIII(X2)-F1:V-L1-X1-L2-F2;

### (i) F1-X2-F1:F2-L2-X1-L1-V;

### (j) F1-X2-F1:V-L1-X1-L2-F2;

### (k) V-L1-X-L2-F2-L3-FVIII-L4-F1;

### (l) V-L1-X-L2-F2-L3-F1-L4-FVIII;

### (m) F1-L4-FVIII-L3-F2-L2-X-L1-V;

### (n) FVIII-L4-F1-L3-F2-L2-X-L1-V;

### (o) FVIII-L4-F1-L3-V-L1-X-L2-F2;

### (p) FVIII-L4-F1-L3-F2-L2-X-L1-V;

### (q) F2-L2-X-L1-V-L3-F1-L4-FVIII;

### (r) F2-L2-X-L1-V-L3-FVIII-L4-F1;

### (s) V-L1-X1-L2-F2-L3-FVIII(X2)-L4-F1;

### (t) V-L1-X1-L2-F2-L3-F1-L4-FVIII(X2);

### (u) F1-L4-FVIII(X2)-L3-F2-L2-X1-L1-V;

### (v) F-L4-FVIII(X2)-L3-V-L1-X1-L2-F2;

### (w) FVIII(X2)-L4-F1-L3-V-L1-X1-L2-F2;

### (x) FVIII(X2)-L4-F1-L3-F2-L2-X1-L1-V;

### (y) F2-L2-X1-L1-V-L3-F1-L4-FVIII(X2);

### (z) F2-L2-X1-L1-V-L3-FVIII(X2)-L4-F1;

### (aa) V-L1-X2-L2-F2-L3-FVIII-L4-X2-L5-F1;

### (bb) V-L1-X2-L2-F2-L3-F1-L5-X2-L4-FVIII;

### (cc) F1-L5-X2-L4-FVIII-L3-F2-L2-X2-L1-V;

### (dd) F1-L5-X2-L4-FVIII-L3-V-L1-X2-L2-F2;

### (ee) FVIII-L5-X2-L4-F2-L3-V-L1-X1-L2-F1;

### (ff) FVIII-L5-X2-L4-F2-L3-F1-L2-X1-L1-V;

### (gg) F1-L2-X1-L1-V-L3-F2-L4-X2-L5-FVIII; or

### (hh) F1-L2-X1-L1-V-L3-FVIII-L5-X2-L4-F2;

[0016] wherein V is a VWF protein, which comprises a D′ domain and a D3 domain, X or X1 is a first XTEN sequence that contains less than 288 amino acids, X2 is a second XTEN sequence, FVIII comprises a FVIII protein, FVIII(X2) comprises a FVIII protein having a second XTEN sequence inserted in one or more insertion sites within the FVIII protein, F1 is a first Ig constant region or a portion thereof, F2 is a second Ig constant region or a portion thereof, L1, L2, L3, L4, or L5 is an optional linker, (-) is a peptide bond; and (:) is a covalent bond or a non-covalent bond.

[0017] Some embodiments include the chimeric protein as described herein, wherein the X or X1 consists of an amino acid sequence in length between 12 amino acids and 287 amino acids.

[0018] In certain embodiments the chimeric protein as described herein exhibits a longer half-life compared to a corresponding chimeric protein comprising the formula except that the X or X1 is AE288. In some embodiments AE288 is SEQ ID NO:8.

[0019] Some embodiments include the chimeric protein as described herein, wherein the X or X1 in the formula contains about 36, about 42, about 72, or about 144 amino acids. In certain embodiments the X or X1 in the formula is selected from AE42, AE72, AE144, AG42, AG72, or AG144. In some embodiments the X or X1 in the formula is selected from SEQ ID NO: 9, SEQ ID NO: 10, SEQ ID NO: 11, SEQ ID NO: 55; SEQ ID NO: 56; SEQ ID NO: 57; SEQ ID NO: 58; SEQ ID NO: 59; SEQ ID NO: 14; SEQ ID NO: 60; SEQ ID NO: 61; SEQ ID NO: 62; or SEQ ID NO: 63. In certain embodiments the X2 comprises an amino acid sequence having a length of at least about 36 amino acids, at least about 42 amino acids, at least about 144 amino acids, at least about 288 amino acids, at least about 576 amino acids, at least about 864 amino acids. In certain embodiments the X2 is selected from AE42, AE72, AE864, AE576, AE288, AE144, AG864, AG576, AG288, and AG144. In some embodiments the X2 is selected from SEQ ID NO: 8; SEQ ID NO: 9; SEQ ID NO: 10; SEQ ID NO: 11; SEQ ID NO: 17; SEQ ID NO: 54; SEQ ID NO: 19; SEQ ID NO: 16; SEQ ID NO: 18; SEQ ID NO: 15; SEQ ID NO: 55; SEQ ID NO: 56; SEQ ID NO: 57; SEQ ID NO: 58; SEQ ID NO: 59; SEQ ID NO: 14; SEQ ID NO: 60; SEQ ID NO: 61; SEQ ID NO: 62; or SEQ ID NO: 63. In certain embodiments the X2 is AE288 or AG288.

[0020] Also disclosed is the chimeric protein as described herein, comprising X or X1 and/or X2 that exhibits a longer half-life compared to the chimeric protein not comprising X or X1 and/or X2. In some embodiments, the L1 and/or L2 is a cleavable linker. In certain embodiments the L4 and/or L5 is a cleavable linker. In certain embodiments the linker is cleavable by a protease selected from factor XIa, factor XIIa, kallikrein, factor VIIa, factor IXa, factor Xa, factor IIa (thrombin), Elastase-2, Granzyme-B, TEV, Enterokinase, Protease 3C, Sortase A, MMP-12, MMP-13, MMP-17, and MMP-20. In some embodiments the linker is cleavable by factor IIa (thrombin).

[0021] Some embodiments include the chimeric protein as described herein, wherein the linker comprises one or more cleavage sites comprising an amino acid sequence selected from RRRR (SEQ ID NO: 102), RKRRKR (SEQ ID NO: 103), RRRRS (SEQ ID NO: 104), TQSFNDFTR (SEQ ID NO: 2), SVSQTSKLTR (SEQ ID NO: 3), DFLAEGGGVR (SEQ ID NO: 4), TTKIKPR (SEQ ID NO: 5), LVPRG (SEQ ID NO: 6), ALRPR (SEQ ID NO: 7), KLTRAET (SEQ ID NO: 121), DFTRVVG (SEQ ID NO: 122), TMTRIVGG (SEQ ID NO: 123), SPFRSTGG (SEQ ID NO: 124), LQVRIVGG (SEQ ID NO: 125), PLGRIVGG (SEQ ID NO: 126), IEGRTVGG (SEQ ID NO: 127), LTPRSLLV (SEQ ID NO: 128), LGPVSGVP (SEQ ID NO: 129), VAGDSLEE (SEQ ID NO: 130), GPAGLGGA (SEQ ID NO: 131), GPAGLRGA (SEQ ID NO: 132), APLGLRLR (SEQ ID NO: 133), PALPLVAQ (SEQ ID NO: 134), ENLYFQG (SEQ ID NO: 135), DDDKIVGG (SEQ ID NO: 136), LEVLFQGP (SEQ ID NO: 137), and LPKTGSES (SEQ ID NO: 138). In some embodiments the linker comprises TLDPRSFLLRNPNDKYEPFWEDEEK (SEQ ID NO: 146). In certain embodiments the linker comprises an amino acid sequence of LVPRG (SEQ ID NO: 6). In some embodiments the linker comprises an a1 region of FVIII, an a2 region of FVIII, an a3 region of FVIII, or any combination thereof. In certain embodiments the linker comprises a fragment of the a2 region of FVIII. The fragment of the a2 region can in some cases comprise the sequence DKNTGDYYEDSYEDISAYLLSKNNAIEPRSFS (SEQ ID NO: 88). In still other embodiments a smaller fragment of the a2 region of FVIII can be used, including a fragment having the sequence of IEPRSFS (SEQ ID NO: 194). In one particular embodiment, the linker comprises the amino acid sequence of IEPRSFS (SEQ ID NO: 194). In another embodiment, the linker comprises the amino acid sequence of IEPRSFS (SEQ ID NO: 194), wherein the linker is not the full-length a2 region of FVIII.

[0022] Also disclosed is the chimeric protein as described herein, wherein the a2 region of FVIII comprises an amino acid sequence at least about 80%, about 85%, about 90%, about 95%, or 100% identical to either ISDKNTGDYYEDSYEDISAYLLSKNNAIEPRSFS (SEQ ID NO: 106) or DKNTGDYYEDSYEDISAYLLSKNNAIEPRSFS (SEQ ID NO: 88). In some embodiments the a1 region comprises an amino acid sequence at least about 80%, about 85%, about 90%, about 95%, or 100% identical to ISMKNNEEAEDYDDDLTDSEMDVVRFDDDNSPSFIQIRSV (SEQ ID NO: 107). In certain embodiments the a3 region comprises an amino acid sequence at least about 80%, about 85%, about 90%, about 95%, or 100% identical to ISEITRTTLQSDQEEIDYDDTISVEMKKEDFDIYDEDENQSPRSFQ (SEQ ID NO: 108). In some embodiments the F1 comprises a first Fc region and/or the F2 comprises a second Fc region.

[0023] Some embodiments include the chimeric protein as described herein, wherein the chimeric protein comprising the F1 and the F2 exhibits a longer half-life compared to the chimeric protein not comparing the F1 and the F2. In certain embodiments the L3 is a processable linker. In some embodiments the VWF protein is associated with the FVIII protein by a non-covalent bond. In some embodiments the half-life of the chimeric protein is extended compared to a FVIII protein without the VWF protein and/or the XTEN sequence or compared to wild type FVIII. In certain embodiments the half-life of the chimeric protein is extended at least about 1.5 times, at least about 2 times, at least about 2.5 times, at least about 3 times, at least about 4 times, at least about 5 times, at least about 6 times, at least about 7 times, at least about 8 times, at least about 9 times, at least about 10 times, at least about 11 times, or at least about 12 times longer than a FVIII protein without the VWF protein or the XTEN sequence or than wild type FVIII.

[0024] Also disclosed is the chimeric protein as described herein, wherein the half-life of the chimeric protein is at least about 17 hours, at least about 18 hours, at least about 19 hours, at least about 20 hours, at least about 21 hours, at least about 22 hours, at least about 23 hours, at least about 24 hours, at least about 25 hours, at least about 26 hours, at least about 27 hours, at least about 28 hours, at least about 29 hours, at least about 30 hours, at least about 31 hours, at least about 32 hours, at least about 33 hours, at least about 34 hours, at least about 35 hours, at least about 36 hours, at least about 48 hours, at least about 60 hours, at least about 72 hours, at least about 84 hours, at least about 96 hours, or at least about 108 hours. In some embodiments the half-life of the chimeric protein is about 40 hours in HemA mice. In certain embodiments the VWF protein does not bind substantially to a VWF clearance receptor. In some embodiments the VWF protein is capable of protecting the FVIII protein from one or more protease cleavages, protecting the FVIII protein from activation, stabilizing the heavy chain and/or the light chain of the FVIII protein, or preventing clearance of the FVIII protein by one or more scavenger receptors.

[0025] Some embodiments include the chimeric protein as described herein, wherein the VWF protein inhibits or prevents endogenous VWF from binding to the FVIII protein by shielding or blocking a VWF binding site on the FVIII protein. In certain embodiments the VWF binding site is located in the A3 domain or the C2 domain of the FVIII protein or both the A3 domain and the C2 domain. In some embodiments the VWF binding site comprises the amino acid sequence corresponding to amino acids 1669 to 1689 and 2303 to 2332 of SEQ ID NO: 65. In some embodiments the first Ig constant region or a portion thereof and the second Ig constant region or a portion thereof are identical or different. In certain embodiments the FVIII protein is linked to and/or inserted with at least two XTEN sequences, at least three XTEN sequences, at least four XTEN sequences, at least five XTEN sequences, or at least six XTEN sequences.

[0026] Also disclosed is the chimeric protein as described herein, wherein the FVIII protein comprises one or more domains of FVIII selected from an A1 domain, a1 acidic region, an A2 domain, a2 acidic region, a B domain, an A3 domain, a3 acidic region, a C1 domain, a C2 domain, one or more fragments thereof, and any combinations thereof.

[0027] Also disclosed is the chimeric protein as described herein, wherein the one or more insertion sites in the FVIII protein is located within one or more domains of the FVIII protein selected from the A1 domain, the a1 acidic region, the A2 domain, the a2 acidic region, the A3 domain, the B domain, the C1 domain, the C2 domain, and any combinations thereof or between one or more domains of the FVIII protein selected from the group consisting of the A1 domain and a1 acidic region, the a1 acidic region and A2 domain, the A2 domain and a2 acidic region, the a2 acidic region and B domain, the B domain and A3 domain, the A3 domain and C1 domain, the C1 domain and C2 domain, and any combinations thereof or between two domains of the FVIII protein selected from the A1 domain and a1 acidic region, the a1 acidic region and A2 domain, the A2 domain and a2 acidic region, the a2 acidic region and B domain, the B domain and A3 domain, the A3 domain and C1 domain, the C1 domain and C2 domain, and any combinations thereof. In some embodiments the one or more insertion sites in the FVIII protein are one or more amino acids selected from the group consisting of the amino acid residues in Table 7, Table 8, Table 9 and Table 10. In certain embodiments the insertion sites in the FVIII protein are located immediately downstream of amino acid 745 corresponding to the mature FVIII protein (SEQ ID NO: 65). In some embodiments the insertion sites in the FVIII protein are located immediately downstream of residue 1656 and residue 1900 corresponding to the mature FVIII protein (SEQ ID NO: 65). In some embodiments the insertion sites in the FVIII protein are immediately downstream of residues 26, 1656, and 1900 corresponding to the mature FVIII protein (SEQ ID NO: 65). In certain embodiments the insertion sites in the FVIII protein are immediately downstream of residues 403 and 745 corresponding to the mature FVIII protein (SEQ ID NO: 65). In some embodiments the insertion sites in the FVIII protein are immediately downstream of residues 745 and 1900 corresponding to the mature FVIII protein (SEQ ID NO: 65). In certain embodiments the insertion sites in the FVIII protein are immediately downstream of residues 18 and 745 corresponding to the mature FVIII protein (SEQ ID NO: 65). In some embodiments the FVIII protein is a dual chain FVIII isoform. In some embodiments the FVIII protein is a single chain FVIII isoform. In certain embodiments the FVIII protein comprises B domain or a portion thereof. In some embodiments the FVIII protein is SQ B domain deleted FVIII.

[0028] Some embodiments include the chimeric protein as described herein, wherein the single chain FVIII isoform contains at least one amino acid substitution at a residue corresponding to residue 1648, residue 1645, or both residues corresponding to the full-length mature Factor VIII polypeptide (SEQ ID NO: 65) or residue 754, residue 751, or both residues of SQ BDD Factor VIII (SEQ ID NO: 67). In certain embodiments the amino acid substitution is an amino acid other than arginine. In some embodiments the dual chain FVIII isoform comprises a first chain comprising a heavy chain of FVIII and a second chain comprising a light chain of FVIII, wherein the heavy chain and the light chain are associated with each other by a metal bond. In certain embodiments the D′ domain comprises an amino acid sequence at least 90%, 95%, 96%, 97%, 98%, 99%, or 100% identical to amino acids 764 to 866 of SEQ ID NO: 21. In some embodiments the D3 domain comprises an amino acid sequence at least 90%, 95%, 96%, 97%, 98%, 99%, or 100% identical to amino acids 867 to 1240 of SEQ ID NO: 21. In certain embodiments the VWF protein is a monomer.

[0029] Also disclosed is the chimeric protein as described herein, which comprises at least two VWF proteins, at least three VWF proteins, at least four VWF proteins, at least five VWF proteins, or at least six VWF proteins. In certain embodiments the VWF protein comprises an amino acid sequence at least 90%, 95%, 96%, 97%, 98%, 99%, or 100% identical to amino acids 764 to 1240 of SEQ ID NO: 21. In some embodiments the VWF protein consists essentially of or consists of amino acids 764 to 1240 of SEQ ID NO: 21. In certain embodiments the VWF protein contains at least one amino acid substitution at a residue corresponding to residue 1099, residue 1142, or both residues 1099 and 1142 of SEQ ID NO: 21. In some embodiments the VWF protein contains an amino acid other than cysteine substituted for a residue corresponding to residue 1099, residue 1142, or both residues 1099 and 1142 of SEQ ID NO: 21. In certain embodiments the VWF protein further comprises the D1 domain, the D2 domain, or the D1 and D2 domains of VWF.

[0030] Some embodiments include the chimeric protein as described herein, wherein the VWF protein further comprises a VWF domain selected from the A1 domain, the A2 domain, the A3 domain, the D4 domain, the B1 domain, the B2 domain, the B3 domain, the C1 domain, the C2 domain, the CK domain, one or more fragments thereof, and any combinations thereof.

[0031] Also disclosed is the chimeric protein as described herein, wherein the VWF protein consists essentially of or consists of: (1) the D′ and D3 domains of VWF or fragments thereof; (2) the D1, D′, and D3 domains of VWF or fragments thereof; (3) the D2, D′, and D3 domains of VWF or fragments thereof; (4) the D1, D2, D′, and D3 domains of VWF or fragments thereof; or (5) the D1, D2, D′, D3, and A1 domains of VWF or fragments thereof.

[0032] Some embodiments include the chimeric protein as described herein, wherein the VWF protein further comprises a signal peptide of VWF or FVIII which is operably linked to the VWF protein.

[0033] Also disclosed is the chimeric protein as described herein, wherein one or more of the linkers have a length of at least about 10, 20, 30, 40, 50, 60, 70, 80, 90, 100, 110, 120, 130, 140, 150, 160, 170, 180, 190, 200, 210, 220, 230, 240, 250, 300, 350, 400, 450, 500, 550, 600, 650, 700, 750, 800, 850, 900, 950, 1000, 1200, 1400, 1600, 1800, or 2000 amino acid residues. In some embodiments one or more of the linkers have a length of about 1 to about 2000 amino acid residues. In certain embodiments one or more of the linkers comprise a gly/ser peptide. In some embodiments the gly/ser peptide has a formula of (Gly₄Ser)ₙ (SEQ ID NO: 94) or S(Gly₄Ser)ₙ (SEQ ID NO: 164), wherein n is a positive integer selected from the group consisting of 1, 2, 3, 4, 5, 6, 7, 8, 9 and 10. In certain embodiments the (Gly₄Ser)ₙ linker is (Gly₄Ser)₃ (SEQ ID NO: 100) or (Gly₄Ser)₄ (SEQ ID NO: 165). In some embodiments the linker comprises 20 amino acids, 35 amino acids, 48 amino acids, 73 amino acids, or 95 amino acids. In certain embodiments the cleavable linker is SGGGGSGGGGSGGGGSGGGGSGGGGSLVPRGSGG (SEQ ID NO: 166).

[0034] In some embodiments, the chimeric protein as described herein is polysialylated, pegylated, or hesylated.

[0035] Also disclosed is the chimeric protein as described herein, wherein the first polypeptide comprises at least about 80%, 90%, 95%, 99%, or 100% identical to FVIII161 (SEQ ID NO: 69), FVIII169 (SEQ ID NO: 70), FVIII173 (SEQ ID NO: 72), FVIII195 (SEQ ID NO: 73), FVIII196 (SEQ ID NO: 74), FVIII199 (SEQ ID NO: 75), FVIII201 (SEQ ID NO: 76), FVIII203 (SEQ ID NO: 77), FVIII204 (SEQ ID NO: 78), FVIII205 (SEQ ID NO: 79), FVIII266 (SEQ ID NO: 80), FVIII267 (SEQ ID NO: 81), FVIII268 (SEQ ID NO: 82), FVIII269 (SEQ ID NO: 83), FVIII271 (SEQ ID NO: 84), FVIII272 (SEQ ID NO: 85), or FVIII282 (SEQ ID NO: 159), and the second polypeptide comprises at least about 80%, 90%, 95%, 99%, or 100% identical to either VWF057 (SEQ ID NO: 152) or VWF059 (SEQ ID NO: 197). In some embodiments, the first polypeptide comprises FVIII169 (SEQ ID NO: 70) and the second polypeptide comprises VWF057 (SEQ ID NO: 152). In other embodiments, the first polypeptide comprises FVIII169 (SEQ ID NO: 70) and the second polypeptide comprises VWF059 (SEQ ID NO: 197). In yet another embodiment, the first polypeptide comprises FVIII169 (SEQ ID NO: 70) and the second polypeptide comprises VWF062 (SEQ ID NO: 199). In some embodiments, the chimeric protein is efficacious in preventing and/or stopping bleeding from a subject in need thereof.

[0036] Also disclosed is a polynucleotide or a set of polynucleotides encoding the chimeric protein as described herein. In some embodiments, the polynucleotide as described herein, further comprises a polynucleotide chain, which encodes PC5 or PC7.

[0037] Some embodiments include a vector comprising the polynucleotide as described herein and one or more promoter operably linked to the polynucleotide or the set of polynucleotides.

[0038] In some embodiments the vector as described herein, further comprises an additional vector, which comprises a polynucleotide chain encoding PC5 or PC7.

[0039] Also disclosed is a host cell comprising the polynucleotide or the vector as described herein. In some embodiments the host cell is a mammalian cell. In certain embodiments the mammalian cell is selected from HEK293 cell, CHO cell, and BHK cell.

[0040] Also disclosed is a pharmaceutical composition comprising the chimeric protein, the polynucleotide, the vector, or the host cell as described herein, and a pharmaceutically acceptable carrier. In some embodiments the chimeric protein has extended half-life compared to wild type FVIII protein. In certain embodiments, the half-life of the chimeric protein is extended at least about 1.5 times, at least about 2 times, at least about 2.5 times, at least about 3 times, at least about 4 times, at least about 5 times, at least about 6 times, at least about 7 times, at least about 8 times, at least about 9 times, at least about 10 times, at least about 11 times, or at least about 12 times longer than wild type FVIII.

[0041] Some embodiments include the composition as described herein, wherein the half-life of the chimeric protein is at least about 17 hours, at least about 18 hours, at least about 19 hours, at least about 20 hours, at least about 21 hours, at least about 22 hours, at least about 23 hours, at least about 24 hours, at least about 25 hours, at least about 26 hours, at least about 27 hours, at least about 28 hours, at least about 29 hours, at least about 30 hours, at least about 31 hours, at least about 32 hours, at least about 33 hours, at least about 34 hours, at least about 35 hours, at least about 36 hours, at least about 48 hours, at least about 60 hours, at least about 72 hours, at least about 84 hours, at least about 96 hours, or at least about 108 hours. In certain embodiments the half-life of the chimeric protein is about 40 hours in HemA mice. In some embodiments the composition as described herein is administered by a route selected from the group consisting of topical administration, intraocular administration, parenteral administration, intrathecal administration, subdural administration and oral administration. In certain embodiments the parenteral administration is intravenous or subcutaneous administration.

[0042] In some embodiments the composition as described herein is used to treat a bleeding disease or condition in a subject in need thereof. In certain embodiments the bleeding disease or condition is selected from the group consisting of a bleeding coagulation disorder, hemarthrosis, muscle bleed, oral bleed, hemorrhage, hemorrhage into muscles, oral hemorrhage, trauma, trauma capitis, gastrointestinal bleeding, intracranial hemorrhage, intra-abdominal hemorrhage, intrathoracic hemorrhage, bone fracture, central nervous system bleeding, bleeding in the retropharyngeal space, bleeding in the retroperitoneal space, bleeding in the illiopsoas sheath and any combinations thereof. In some embodiments the subject is scheduled to undergo a surgery. In certain embodiments the treatment is prophylactic or on-demand.

[0043] Also disclosed is a method of extending or increasing half-life of the chimeric protein, wherein the method comprises adding an effective amount of the chimeric protein, the polynucleotide, the vector, the host cell, or the composition as described herein to a subject in need thereof, wherein the VWF protein, the XTEN sequence, the first Ig constant region or a portion thereof, and the second Ig constant region or a portion thereof increase the half-life of the chimeric protein.

[0044] Some embodiments include a method of treating a bleeding disease or disorder in a subject in need thereof comprising administering an effective amount of the chimeric protein, the polynucleotide, the vector, the host cell, or the composition as described herein, wherein the bleeding disease or disorder is selected from the group consisting of a bleeding coagulation disorder, hemarthrosis, muscle bleed, oral bleed, hemorrhage, hemorrhage into muscles, oral hemorrhage, trauma, trauma capitis, gastrointestinal bleeding, intracranial hemorrhage, intra-abdominal hemorrhage, intrathoracic hemorrhage, bone fracture, central nervous system bleeding, bleeding in the retropharyngeal space, bleeding in the retroperitoneal space, and bleeding in the illiopsoas sheath. In some embodiments the subject is an animal. In certain embodiments the animal is a human. In some embodiments the subject is suffering from hemophilia A. In certain embodiments the treatment is prophylactic or on-demand. In some embodiments the effective amount is 0.1 μg/kg to 500 mg/kg.

[0045] Also disclosed is a method as described herein, wherein the chimeric protein, the polynucleotide, the vector, the host cell, or the composition as described herein is administered by a route selected from the group consisting of topical administration, intraocular administration, parenteral administration, intrathecal administration, subdural administration and oral administration. In certain embodiments the parenteral administration is selected from the group consisting of intravenous administration, subcutaneous administration, intramuscular administration, and intradermal administration.

[0046] Some embodiments include a method of making a chimeric protein, comprising transfecting one or more host cell with the polynucleotide or the vector as described herein and expressing the chimeric protein in the host cell. In some embodiments, the method as described herein further comprises isolating the chimeric protein. In certain embodiments the chimeric protein is efficacious in stopping and/or preventing bleeding in the subject.

### BRIEF DESCRIPTION OF THE DRAWINGS/FIGURES

[0047] FIG. 1 shows a schematic diagram of a chimeric protein comprising a first polypeptide which comprises a FVIII protein (A1-A2-partial or full B-A3-C1-C2) fused to an Fc region, wherein an XTEN is inserted at an insertion site within the FVIII protein and a second polypeptide which comprises a VWF protein comprising D′D3 domains, an XTEN having less than 288 amino acids, a thrombin cleavable linker, and a second Fc region. XTEN insertions in the FVIII protein and/or fusions to the VWF protein extend a half-life of the chimeric protein by increasing the hydrodynamic radius and by blocking receptor-mediated clearance. The D′D3 domains of VWF block FVIII interaction with endogenous VWF, stabilize the FVIII protein, and extend a half-life of the chimeric protein. The Fc domains can covalently link the D′D3 domains with the FVIII protein and extend a half-life of the chimeric protein through FcRn-mediated recycling pathway. The thrombin-cleavable linker enables a release of the D′D3 domains upon FVIII activation and ensures the correct alignment between FVIII and the D′D3 domains of VWF.

[0048] FIG. 2 shows three plasmid expression system for FVIII-XTEN-Fc:D′D3-XTEN-Fc heterodimers: a first plasmid comprising a nucleotide sequence encoding single chain FVIII-XTEN-Fc in which an XTEN is inserted in the B domain; a second plasmid comprising a nucleotide sequence encoding D1D2D′D3-XTEN-Fc, in which the XTEN sequence comprises less than 288 amino acids; and a third plasmid comprising a nucleotide sequence encoding PACE, a propeptide processing enzyme. When the three polypeptides are expressed from the three plasmids, the D1D2 propeptide domains of VWF can be processed from the D′D3 domains by intracellular processing. The resulting complex contains three products, the first molecule being FVIII-XTEN/D′D3 heterodimers, the second molecule being a by-product, homodimer of D′D3-XTEN-Fc, and the third molecule being another by-product, i.e., FVIII(XTEN)-Fc.

[0049] FIG. 3 shows additive effects of XTEN insertions on the half-life extension of the heterodimers. FVIII169 comprises a B domain deleted FVIII protein fused to an Fc region, wherein an XTEN sequence (e.g., AE288) is inserted at amino acid 745 corresponding to mature full length FVIII. FVIII205 comprises a B domain deleted FVIII protein fused to an Fc region, wherein an XTEN sequence (e.g., AE144) is inserted at amino acid 18 corresponding to mature full length FVIII and another XTEN sequence (e.g., AE288) is inserted at amino acid 745 corresponding to mature full length FVIII. VWF031 comprises a D′ domain and a D3 domain of VWF fused to an Fc region by a thrombin cleavable linker (no XTEN). VWF034 comprises a D′ domain and a D3 domain of VWF fused to AE288 and an Fc region. The half-life of FVIII169/VWF031 (inverted triangle) is 16.7 hours in HemA mice; the half-life of FVIII205/VWF031 (circle) is 29.4 hours in HemA mice; and the half-life of FVIII169/VWF034 (square) is 31.1 hours in HemA mice.

[0050] FIG. 4 shows that AE144 XTEN confers better half-life extension than AE288 XTEN when inserted between the D′D3 domains of VWF and Fc domains. For example, while the half-life of VWF169/VWF034 (square) is 31.1. hours in HemA mice, the half-life of FVIII169/VWF057 (circle) is 42 hours in HemA mice. VWF057 comprises D′D3 domains of VWF fused to AE144 and an Fc region.

[0051] FIG. 5 shows that Fc domains are needed for half-life extension of the chimeric protein heterodimers. When the half-life of FVIII205/VWF031 (circle) was compared in HemA mice with that of FVIII263NWF050 (square), which contains mutations at the FcRn binding sites (IHH triple mutation Fc) and thus cannot be recycled through FcRn pathway, the half-life of FVIII263/VWF050 (23 hours) is shorter than that of VWF205/VWF031 (29.4 hours). This indicates that the Fc regions are necessary for half-life extension.

[0052] FIG. 6A shows similar acute efficacy of FVIII-XTEN-Fc/D′D3-XTEN-Fc heterodimers compared to B domain deleted FVIII (SQ BDD FVIII) in HemA mice tail clip model. Mice were dosed at 75 IU/kg, and the activity was measured by aPTT assay. SQ BDD FVIII is shown as circle while FVIII169/VWF034 is shown as square, FVIII169NWF057 is shown as diamond, and vehicle is shown as inverted triangle. The construct details of FVIII169, VWF034, and VWF057 are shown elsewhere herein. FIG. 6B shows a comparison of the acute efficacy of FVIII169/VWF034 with B domain deleted FVIII (SQ BDD FVIII) in HemA mice at 37.5 IU/kg dose, and the activity was measured by aPTT assay. The median blood loss (uL) of mice in each treatment groups are indicated by the horizontal lines, blood loss (uL) in C57/BL6 mice is shown as hollow triangle; the blood loss (uL) after dosing of 37.5 IU/kg of rBDD-FVIII is shown as hollow circle; the blood loss (uL) after dosing of 37.5 IU/kg FVIII169/VWF034 is shown as hollow square and the blood loss (uL) after dosing of vehicle is shown as inverted triangle.

[0053] FIGS. 7A-B show that rFVIII169/VWF057 heterodimer provides longer protection to HemA mice in Tail Vein Transection Bleeding Model. FIG. 7A shows the rebleeding data in mice that received rFVIII169/VWF057 at 72 hours before tail injury (square), SQ BDD-FVIII at 48 hours before tail injury (diamond), SQ BDD FVIII at 24 hours before tail injury (inverted triangle), and vehicle (circle). The activity was measured by aPTT assay. X-axis shows time in hours, and the Y axis shows percent of Non-Bleeders. FIG. 7B shows the corresponding survival data in the four categories of the mice shown in FIG. 7A. The mice received 12 IU/kg of FVIII169/VWF057 72 hours prior to tail injury showed similar protection on re-bleeding and survival compared to the mice received SQ BDD FVIII treatment 24 hour before the tail injury.

[0054] FIG. 8A shows the comparable rebleeding data in mice that received rFVIII-XTEN-Fc/D′D3-XTEN-Fc Heterodimers at 96 hours versus rBDD-FVIII at 24 hours before the injury. Filled squares show the rebleeding data in mice received FVIII169/VWF034 at 24 hours before the injury; hollow squares show the rebleeding data in mice received FVIII169/VWF034 at 96 hours before the injury; filled diamond show the rebleeding data in mice received FVIII169/VWF057 at 24 hours before the injury; hollow diamond show the rebleeding data in mice received FVIII169/VWF057 at 96 hours before the injury; filled circles show the rebleeding data in mice received rBDD-FVIII at 24 hours before the injury; hollow circles show the rebleeding data in mice received rBDD-FVIII at 48 hours before the injury; and filled triangle show the rebleeding data in mice received vehicle. X axis shows time in hours, and y axis shows percent of Non-Bleeders

[0055] FIG. 8B shows the survival curve in mice that received rFVIII-XTEN-Fc/D′D3-XTEN-Fc heterodimers at 96 hours versus rBDD-FVIII at 24 hours before the injury. X axis shows time in hours, and y axis shows percent of survival. The symbols are the same as FIG. 8A.

[0056] FIG. 9 shows a diagram of representative FVIII-VWF heterodimers and FVIII169, FVIII286, VWF057, VWF059, and VWF062 constructs. For example, FVIII169 construct comprises a B domain deleted FVIII protein with R1648A substitution fused to an Fc region, wherein an XTEN sequence (e.g., AE288) is inserted at amino acid 745 corresponding to mature full length FVIII (A1-a1-A2-a2-288XTEN-a3-A3-C1-C2-Fc). FVIII286 construct comprises a B domain deleted FVIII protein with R1648 substitution fused to an Fc region, wherein an XTEN sequence (e.g., AE288) is inserted at amino acid 745 corresponding to mature full length FVIII, with additional a2 region in between FVIII and Fc (A1-a1-A2-a2-288XTEN-a3-A3-C1-C2-a2-Fc). VWF057 is a VWF-Fc fusion construct that comprises D′D3 domain of the VWF protein (with two amino acid substitutions in D′D3 domain, i.e., C336A and C379A) linked to the Fc region via a VWF linker, which comprises LVPRG thrombin site (“LVPRG”; SEQ ID NO: 6) and GS linker (“GS”), wherein an XTEN sequence (i.e., AE144) is inserted between D′D3 domain and the VWF linker (D′D3-144XTEN-GS+LVPRG-Fc). VWF059 is a VWF-Fc fusion construct that comprises D′D3 domain of the VWF protein (with two amino acid substitutions in D′D3 domain, i.e., C336A and C379A) linked to the Fc region via an acidic region 2 (a2) of FVIII as a VWF linker, wherein an XTEN sequence (i.e., AE144) is inserted between D′D3 domain and the VWF linker. VWF062 is a VWF-Fc fusion construct that comprises D′D3 domain of the VWF protein (with two amino acid substitutions in D′D3 domain, i.e., C336A and C379A) linked to the Fc region, wherein an XTEN sequence (i.e., AE144) is inserted between D′D3 domain and the Fc region (D′D3-144XTEN-Fc).

[0057] FIG. 10 shows a schematic diagram representing FVIII/VWF heterodimer constructs, for example, FVIII169NWF057, FVIII169/VWF059, FVIII169/VWF059A, and FVIII169/VWF073. The arrow shows the site where an optional linker is added to introduce a thrombin cleavage site. FVIII169/VWF057 has a linker comprising LVPRG (SEQ ID NO: 6). FVIII169/VWF059 has a linker comprising the FVIII a2 region (i.e.,

(i.e., ISDKNTGDYYEDSYEDISAYLLSKNNAIEPRSFSDKTH
(SEQ ID NO: 106)).

FVIII169/VWF059A has a linker comprising a truncated FVIII a2 region (i.e.,

(i.e., DKNTGDYYEDSYEDISAYLLSKNNAIEPRSFSDKTH
(SEQ ID NO: 88)).

FVIII169/VWF073 has a linker within the VWF073 construct (SEQ ID NO: 175) comprising a fragment of the FVIII a2 region consisting of IEPRSFS (SEQ ID NO: 194).

[0058] FIGS. 11A-C show SDS-PAGE images following thrombin digestion of FVIII169/VWF057 and a FVIII-Fc control. FIG. 11A shows staining of the SDS-PAGE gel with an anti-D3 antibody (AB 96340). Arrows highlight “LCFc:D′D3-XTEN-Fc,” which is the un-cleaved, full-length FVIII169/VWF057; and “D′D3-144 XTEN,” which is the resulting fragment following cleavage by thrombin. FIG. 11B shows staining of the SDS-PAGE gel with an anti-HC antibody (GMA012). Arrows highlight the FVIII heavy chain (“HC”) and FVIII A2 domain. FIG. 11C shows the overlay of panels A and B. Samples were collected at the time points indicated at the top of each panel. Arrows point to the relevant proteins.

[0059] FIGS. 12A-C shows SDS-PAGE images following thrombin digestion of FVIII169/VWF059. FIG. 12A shows staining of the SDS-PAGE gel with an anti-D3 antibody (AB 96340). Arrows highlight “LCFc:D′D3-XTEN-Fc,” which is the un-cleaved, full-length FVIII169/VWF059; and “D′D3-144 XTEN,” which is the resulting fragment following cleavage by thrombin. FIG. 12B shows staining of the SDS-PAGE gel with an anti-HC antibody (GMA012). Arrows highlight the un-cleaved, full length FVIII169/VWF059; D′D3-144 XTEN-a3, which is the resulting fragment following cleavage by thrombin; and “A2,” which is the A2 domain of FVIII. FIG. 12C shows the overlay of panels A and B. Samples were collected at the time points indicated at the top of each panel

[0060] FIG. 13 shows acute efficacy data of HemA mice treated with FVIII169NWF059 (circle) as compared to HemA mice treated with a BDD-FVIII control (Square). Blood loss value was measured following tail clip. p=0.9883.

### DETAILED DESCRIPTION OF THE INVENTION

[0061] The present invention is directed to a chimeric protein comprising two polypeptides, a first polypeptide comprising a FVIII protein fused to a first Ig constant region and a second polypeptide comprising a VWF protein fused to a second Ig constant region or a portion thereof by an XTEN sequence, wherein the XTEN sequence contains less than 288 amino acids.

### I. DEFINITIONS

[0062] It is to be noted that the term “a” or “an” entity refers to one or more of that entity; for example, “a nucleotide sequence,” is understood to represent one or more nucleotide sequences. As such, the terms “a” (or “an”), “one or more,” and “at least one” can be used interchangeably herein.

[0063] Furthermore, “and/or” where used herein is to be taken as specific disclosure of each of the two specified features or components with or without the other. Thus, the term “and/or” as used in a phrase such as “A and/or B” herein is intended to include “A and B,” “A or B,” “A” (alone), and “B” (alone). Likewise, the term “and/or” as used in a phrase such as “A, B, and/or C” is intended to encompass each of the following aspects: A, B, and C; A, B, or C; A or C; A or B; B or C; A and C; A and B; B and C; A (alone); B (alone); and C (alone).

[0064] It is understood that wherever aspects are described herein with the language “comprising,” otherwise analogous aspects described in terms of “consisting of” and/or “consisting essentially of” are also provided.

[0065] Unless defined otherwise, all technical and scientific terms used herein have the same meaning as commonly understood by one of ordinary skill in the art to which this disclosure is related. For example, the Concise Dictionary of Biomedicine and Molecular Biology, Juo, Pei-Show, 2nd ed., 2002, CRC Press; The Dictionary of Cell and Molecular Biology, 3rd ed., 1999, Academic Press; and the Oxford Dictionary Of Biochemistry And Molecular Biology, Revised, 2000, Oxford University Press, provide one of skill with a general dictionary of many of the terms used in this disclosure.

[0066] Units, prefixes, and symbols are denoted in their Systeme International de Unites (SI) accepted form. Numeric ranges are inclusive of the numbers defining the range. Unless otherwise indicated, amino acid sequences are written left to right in amino to carboxy orientation. The headings provided herein are not limitations of the various aspects of the disclosure, which can be had by reference to the specification as a whole. Accordingly, the terms defined immediately below are more fully defined by reference to the specification in its entirety.

[0067] The term “about” is used herein to mean approximately, roughly, around, or in the regions of. When the term “about” is used in conjunction with a numerical range, it modifies that range by extending the boundaries above and below the numerical values set forth. In general, the term “about” can modify a numerical value above and below the stated value by a variance of, e.g., 10 percent, up or down (higher or lower).

[0068] The term “polynucleotide” or “nucleotide” is intended to encompass a singular nucleic acid as well as plural nucleic acids, and refers to an isolated nucleic acid molecule or construct, e.g., messenger RNA (mRNA) or plasmid DNA (pDNA). In certain embodiments, a polynucleotide comprises a conventional phosphodiester bond or a non-conventional bond (e.g., an amide bond, such as found in peptide nucleic acids (PNA)). The term “nucleic acid” refers to any one or more nucleic acid segments, e.g., DNA or RNA fragments, present in a polynucleotide. By “isolated” nucleic acid or polynucleotide is intended a nucleic acid molecule, DNA or RNA, which has been removed from its native environment. For example, a recombinant polynucleotide encoding a Factor VIII polypeptide contained in a vector is considered isolated for the purposes of the present invention. Further examples of an isolated polynucleotide include recombinant polynucleotides maintained in heterologous host cells or purified (partially or substantially) from other polynucleotides in a solution. Isolated RNA molecules include in vivo or in vitro RNA transcripts of polynucleotides of the present invention. Isolated polynucleotides or nucleic acids according to the present invention further include such molecules produced synthetically. In addition, a polynucleotide or a nucleic acid can include regulatory elements such as promoters, enhancers, ribosome binding sites, or transcription termination signals.

[0069] As used herein, a “coding region” or “coding sequence” is a portion of polynucleotide which consists of codons translatable into amino acids. Although a “stop codon” (TAG, TGA, or TAA) is typically not translated into an amino acid, it may be considered to be part of a coding region, but any flanking sequences, for example promoters, ribosome binding sites, transcriptional terminators, introns, and the like, are not part of a coding region. The boundaries of a coding region are typically determined by a start codon at the 5′ terminus, encoding the amino terminus of the resultant polypeptide, and a translation stop codon at the 3′ terminus, encoding the carboxyl terminus of the resulting polypeptide. Two or more coding regions of the present invention can be present in a single polynucleotide construct, e.g., on a single vector, or in separate polynucleotide constructs, e.g., on separate (different) vectors. It follows, then, that a single vector can contain just a single coding region, or comprise two or more coding regions, e.g., a single vector can separately encode a binding domain-A and a binding domain-B as described below. In addition, a vector, polynucleotide, or nucleic acid of the invention can encode heterologous coding regions, either fused or unfused to a nucleic acid encoding a binding domain of the invention. Heterologous coding regions include without limitation specialized elements or motifs, such as a secretory signal peptide or a heterologous functional domain.

[0070] Certain proteins secreted by mammalian cells are associated with a secretory signal peptide which is cleaved from the mature protein once export of the growing protein chain across the rough endoplasmic reticulum has been initiated. Those of ordinary skill in the art are aware that signal peptides are generally fused to the N-terminus of the polypeptide, and are cleaved from the complete or “full-length” polypeptide to produce a secreted or “mature” form of the polypeptide. In certain embodiments, a native signal peptide or a functional derivative of that sequence that retains the ability to direct the secretion of the polypeptide that is operably associated with it. Alternatively, a heterologous mammalian signal peptide, e.g., a human tissue plasminogen activator (TPA) or mouse β-glucuronidase signal peptide, or a functional derivative thereof, can be used.

[0071] The term “downstream,” when refers to a nucleotide sequence, means that a nucleic acid or a nucleotide sequence is located 3′ to a reference nucleotide sequence. In certain embodiments, downstream nucleotide sequences relate to sequences that follow the starting point of transcription. For example, the translation initiation codon of a gene is located downstream of the start site of transcription. The term “downstream,” when refers to a polypeptide sequence, means that the amino acid or an amino acid insertion site is located at the C-terminus of the reference amino acids. For example, an insertion site immediately downstream of amino acid 745 corresponding to the mature wild type FVIII protein means that the insertion site is between amino acid 745 and amino acid 746 corresponding to the mature wild type FVIII protein.

[0072] The term “upstream” refers to a nucleotide sequence that is located 5′ to a reference nucleotide sequence. In certain embodiments, upstream nucleotide sequences relate to sequences that are located on the 5′ side of a coding region or starting point of transcription. For example, most promoters are located upstream of the start site of transcription.

[0073] As used herein, the term “regulatory region” refers to nucleotide sequences located upstream (5′ non-coding sequences), within, or downstream (3′ non-coding sequences) of a coding region, and which influence the transcription, RNA processing, stability, or translation of the associated coding region. Regulatory regions may include promoters, translation leader sequences, introns, polyadenylation recognition sequences, RNA processing sites, effector binding sites and stem-loop structures. If a coding region is intended for expression in a eukaryotic cell, a polyadenylation signal and transcription termination sequence will usually be located 3′ to the coding sequence.

[0074] A polynucleotide which encodes a gene product, e.g., a polypeptide, can include a promoter and/or other transcription or translation control elements operably associated with one or more coding regions. In an operable association a coding region for a gene product, e.g., a polypeptide, is associated with one or more regulatory regions in such a way as to place expression of the gene product under the influence or control of the regulatory region(s). For example, a coding region and a promoter are “operably associated” if induction of promoter function results in the transcription of mRNA encoding the gene product encoded by the coding region, and if the nature of the linkage between the promoter and the coding region does not interfere with the ability of the promoter to direct the expression of the gene product or interfere with the ability of the DNA template to be transcribed. Other transcription control elements, besides a promoter, for example enhancers, operators, repressors, and transcription termination signals, can also be operably associated with a coding region to direct gene product expression.

[0075] A variety of transcription control regions are known to those skilled in the art. These include, without limitation, transcription control regions which function in vertebrate cells, such as, but not limited to, promoter and enhancer segments from cytomegaloviruses (the immediate early promoter, in conjunction with intron-A), simian virus 40 (the early promoter), and retroviruses (such as Rous sarcoma virus). Other transcription control regions include those derived from vertebrate genes such as actin, heat shock protein, bovine growth hormone and rabbit β-globin, as well as other sequences capable of controlling gene expression in eukaryotic cells. Additional suitable transcription control regions include tissue-specific promoters and enhancers as well as lymphokine-inducible promoters (e.g., promoters inducible by interferons or interleukins).

[0076] Similarly, a variety of translation control elements are known to those of ordinary skill in the art. These include, but are not limited to ribosome binding sites, translation initiation and termination codons, and elements derived from picornaviruses (particularly an internal ribosome entry site, or IRES, also referred to as a CITE sequence).

[0077] The term “expression” as used herein refers to a process by which a polynucleotide produces a gene product, for example, an RNA or a polypeptide. It includes without limitation transcription of the polynucleotide into messenger RNA (mRNA), transfer RNA (tRNA), small hairpin RNA (shRNA), small interfering RNA (siRNA) or any other RNA product, and the translation of an mRNA into a polypeptide. Expression produces a “gene product.” As used herein, a gene product can be either a nucleic acid, e.g., a messenger RNA produced by transcription of a gene, or a polypeptide which is translated from a transcript. Gene products described herein further include nucleic acids with post transcriptional modifications, e.g., polyadenylation or splicing, or polypeptides with post translational modifications, e.g., methylation, glycosylation, the addition of lipids, association with other protein subunits, or proteolytic cleavage.

[0078] A “vector” refers to any vehicle for the cloning of and/or transfer of a nucleic acid into a host cell. A vector may be a replicon to which another nucleic acid segment may be attached so as to bring about the replication of the attached segment. A “replicon” refers to any genetic element (e.g., plasmid, phage, cosmid, chromosome, virus) that functions as an autonomous unit of replication in vivo, i.e., capable of replication under its own control. The term “vector” includes both viral and nonviral vehicles for introducing the nucleic acid into a cell in vitro, ex vivo or in vivo. A large number of vectors are known and used in the art including, for example, plasmids, modified eukaryotic viruses, or modified bacterial viruses. Insertion of a polynucleotide into a suitable vector can be accomplished by ligating the appropriate polynucleotide fragments into a chosen vector that has complementary cohesive termini.

[0079] Vectors may be engineered to encode selectable markers or reporters that provide for the selection or identification of cells that have incorporated the vector. Expression of selectable markers or reporters allows identification and/or selection of host cells that incorporate and express other coding regions contained on the vector. Examples of selectable marker genes known and used in the art include: genes providing resistance to ampicillin, streptomycin, gentamycin, kanamycin, hygromycin, bialaphos herbicide, sulfonamide, and the like; and genes that are used as phenotypic markers, i.e., anthocyanin regulatory genes, isopentanyl transferase gene, and the like. Examples of reporters known and used in the art include: luciferase (Luc), green fluorescent protein (GFP), chloramphenicol acetyltransferase (CAT), -galactosidase (LacZ), -glucuronidase (Gus), and the like. Selectable markers may also be considered to be reporters.

[0080] The term “plasmid” refers to an extra-chromosomal element often carrying a gene that is not part of the central metabolism of the cell, and usually in the form of circular double-stranded DNA molecules. Such elements may be autonomously replicating sequences, genome integrating sequences, phage or nucleotide sequences, linear, circular, or supercoiled, of a single- or double-stranded DNA or RNA, derived from any source, in which a number of nucleotide sequences have been joined or recombined into a unique construction which is capable of introducing a promoter fragment and DNA sequence for a selected gene product along with appropriate 3′ untranslated sequence into a cell.

[0081] Eukaryotic viral vectors that can be used include, but are not limited to, adenovirus vectors, retrovirus vectors, adeno-associated virus vectors, and poxvirus, e.g., vaccinia virus vectors, baculovirus vectors, or herpesvirus vectors. Non-viral vectors include plasmids, liposomes, electrically charged lipids (cytofectins), DNA-protein complexes, and biopolymers.

[0082] A “cloning vector” refers to a “replicon,” which is a unit length of a nucleic acid that replicates sequentially and which comprises an origin of replication, such as a plasmid, phage or cosmid, to which another nucleic acid segment may be attached so as to bring about the replication of the attached segment. Certain cloning vectors are capable of replication in one cell type, e.g., bacteria and expression in another, e.g., eukaryotic cells. Cloning vectors typically comprise one or more sequences that can be used for selection of cells comprising the vector and/or one or more multiple cloning sites for insertion of nucleic acid sequences of interest.

[0083] The term “expression vector” refers to a vehicle designed to enable the expression of an inserted nucleic acid sequence following insertion into a host cell. The inserted nucleic acid sequence is placed in operable association with regulatory regions as described above.

[0084] Vectors are introduced into host cells by methods well known in the art, e.g., transfection, electroporation, microinjection, transduction, cell fusion, DEAE dextran, calcium phosphate precipitation, lipofection (lysosome fusion), use of a gene gun, or a DNA vector transporter.

[0085] “Culture,” “to culture” and “culturing,” as used herein, means to incubate cells under in vitro conditions that allow for cell growth or division or to maintain cells in a living state. “Cultured cells,” as used herein, means cells that are propagated in vitro.

[0086] As used herein, the term “polypeptide” is intended to encompass a singular “polypeptide” as well as plural “polypeptides,” and refers to a molecule composed of monomers (amino acids) linearly linked by amide bonds (also known as peptide bonds). The term “polypeptide” refers to any chain or chains of two or more amino acids, and does not refer to a specific length of the product. Thus, peptides, dipeptides, tripeptides, oligopeptides, “protein,” “amino acid chain,” or any other term used to refer to a chain or chains of two or more amino acids, are included within the definition of “polypeptide,” and the term “polypeptide” can be used instead of, or interchangeably with any of these terms. The term “polypeptide” is also intended to refer to the products of post-expression modifications of the polypeptide, including without limitation glycosylation, acetylation, phosphorylation, amidation, derivatization by known protecting/blocking groups, proteolytic cleavage, or modification by non-naturally occurring amino acids. A polypeptide can be derived from a natural biological source or produced recombinant technology, but is not necessarily translated from a designated nucleic acid sequence. It can be generated in any manner, including by chemical synthesis.

[0087] An “isolated” polypeptide or a fragment, variant, or derivative thereof refers to a polypeptide that is not in its natural milieu. No particular level of purification is required. For example, an isolated polypeptide can simply be removed from its native or natural environment. Recombinantly produced polypeptides and proteins expressed in host cells are considered isolated for the purpose of the invention, as are native or recombinant polypeptides which have been separated, fractionated, or partially or substantially purified by any suitable technique.

[0088] Also included in the present invention are fragments or variants of polypeptides, and any combination thereof. The term “fragment” or “variant” when referring to polypeptide binding domains or binding molecules of the present invention include any polypeptides which retain at least some of the properties (e.g., FcRn binding affinity for an FcRn binding domain or Fc variant, coagulation activity for an FVIII variant, or FVIII binding activity for the VWF fragment) of the reference polypeptide. Fragments of polypeptides include proteolytic fragments, as well as deletion fragments, in addition to specific antibody fragments discussed elsewhere herein, but do not include the naturally occurring full-length polypeptide (or mature polypeptide). Variants of polypeptide binding domains or binding molecules of the present invention include fragments as described above, and also polypeptides with altered amino acid sequences due to amino acid substitutions, deletions, or insertions. Variants can be naturally or non-naturally occurring. Non-naturally occurring variants can be produced using art-known mutagenesis techniques. Variant polypeptides can comprise conservative or non-conservative amino acid substitutions, deletions or additions.

[0089] The term “VWF protein” or “VWF proteins” used herein means any VWF fragments that interact with FVIII and retain at least one or more properties that are normally provided to FVIII by full-length VWF, e.g., preventing premature activation to FVIIIa, preventing premature proteolysis, preventing association with phospholipid membranes that could lead to premature clearance, preventing binding to FVIII clearance receptors that can bind naked FVIII but not VWF-bound FVIII, and/or stabilizing the FVIII heavy chain and light chain interactions.

[0090] A “conservative amino acid substitution” is one in which the amino acid residue is replaced with an amino acid residue having a similar side chain. Families of amino acid residues having similar side chains have been defined in the art, including basic side chains (e.g., lysine, arginine, histidine), acidic side chains (e.g., aspartic acid, glutamic acid), uncharged polar side chains (e.g., glycine, asparagine, glutamine, serine, threonine, tyrosine, cysteine), nonpolar side chains (e.g., alanine, valine, leucine, isoleucine, proline, phenylalanine, methionine, tryptophan), beta-branched side chains (e.g., threonine, valine, isoleucine) and aromatic side chains (e.g., tyrosine, phenylalanine, tryptophan, histidine). Thus, if an amino acid in a polypeptide is replaced with another amino acid from the same side chain family, the substitution is considered to be conservative. In another embodiment, a string of amino acids can be conservatively replaced with a structurally similar string that differs in order and/or composition of side chain family members.

[0091] As known in the art, “sequence identity” between two polypeptides is determined by comparing the amino acid sequence of one polypeptide to the sequence of a second polypeptide. When discussed herein, whether any particular polypeptide is at least about 50%, 60%, 70%, 75%, 80%, 85%, 90%, 95%, 99%, or 100% identical to another polypeptide can be determined using methods and computer programs/software known in the art such as, but not limited to, the BESTFIT program (Wisconsin Sequence Analysis Package, Version 8 for Unix, Genetics Computer Group, University Research Park, 575 Science Drive, Madison, Wis. 53711). BESTFIT uses the local homology algorithm of Smith and Waterman, Advances in Applied Mathematics 2:482-489 (1981), to find the best segment of homology between two sequences. When using BESTFIT or any other sequence alignment program to determine whether a particular sequence is, for example, 95% identical to a reference sequence according to the present invention, the parameters are set, of course, such that the percentage of identity is calculated over the full-length of the reference polypeptide sequence and that gaps in homology of up to 5% of the total number of amino acids in the reference sequence are allowed.

[0092] As used herein, an “amino acid corresponding to” or an “equivalent amino acid” in a VWF sequence or a FVIII protein sequence is identified by alignment to maximize the identity or similarity between a first VWF or FVIII sequence and a second VWF or FVIII sequence. The number used to identify an equivalent amino acid in a second VWF or FVIII sequence is based on the number used to identify the corresponding amino acid in the first VWF or FVIII sequence.

[0093] As used herein, the term “insertion site” refers to a position in a FVIII polypeptide, or fragment, variant, or derivative thereof, which is immediately upstream of the position at which a heterologous moiety can be inserted. An “insertion site” is specified as a number, the number being the number of the amino acid in mature native FVIII (SEQ ID NO: 65) to which the insertion site corresponds, which is immediately N-terminal to the position of the insertion. For example, the phrase “a3 comprises an XTEN at an insertion site which corresponds to amino acid 1656 of SEQ ID NO: 65” indicates that the heterologous moiety is located between two amino acids corresponding to amino acid 1656 and amino acid 1657 of SEQ ID NO: 65.

[0094] The phrase “immediately downstream of an amino acid” as used herein refers to position right next to the terminal carboxyl group of the amino acid. Similarly, the phrase “immediately upstream of an amino acid” refers to the position right next to the terminal amine group of the amino acid. Therefore, the phrase “between two amino acids of an insertion site” as used herein refers to a position in which an XTEN or any other polypeptide is inserted between two adjacent amino acids. Thus, the phrases “inserted immediately downstream of an amino acid” and “inserted between two amino acids of an insertion site” are used synonymously with “inserted at an insertion site.”

[0095] The terms “inserted,” “is inserted,” “inserted into” or grammatically related terms, as used herein refers to the position of an XTEN in a chimeric polypeptide relative to the analogous position in native mature human FVIII. As used herein the terms refer to the characteristics of the recombinant FVIII polypeptide relative to native mature human FVIII, and do not indicate, imply or infer any methods or process by which the chimeric polypeptide was made. For example, in reference to a chimeric polypeptide provided herein, the phrase “an XTEN is inserted into immediately downstream of residue 745 of the FVIII polypeptide” means that the chimeric polypeptide comprises an XTEN immediately downstream of an amino acid which corresponds to amino acid 745 in native mature human FVIII, e.g., bounded by amino acids corresponding to amino acids 745 and 746 of native mature human FVIII.

[0096] A “fusion” or “chimeric” protein comprises a first amino acid sequence linked to a second amino acid sequence with which it is not naturally linked in nature. The amino acid sequences which normally exist in separate proteins can be brought together in the fusion polypeptide, or the amino acid sequences which normally exist in the same protein can be placed in a new arrangement in the fusion polypeptide, e.g., fusion of a Factor VIII domain of the invention with an Ig Fc domain. A fusion protein is created, for example, by chemical synthesis, or by creating and translating a polynucleotide in which the peptide regions are encoded in the desired relationship. A chimeric protein can further comprises a second amino acid sequence associated with the first amino acid sequence by a covalent, non-peptide bond or a non-covalent bond.

[0097] As used herein, the term “half-life” refers to a biological half-life of a particular polypeptide in vivo. Half-life may be represented by the time required for half the quantity administered to a subject to be cleared from the circulation and/or other tissues in the animal. When a clearance curve of a given polypeptide is constructed as a function of time, the curve is usually biphasic with a rapid a-phase and longer β-phase. The a-phase typically represents an equilibration of the administered Fc polypeptide between the intra- and extra-vascular space and is, in part, determined by the size of the polypeptide. The β-phase typically represents the catabolism of the polypeptide in the intravascular space. In some embodiments, FVIII and chimeric proteins comprising FVIII are monophasic, and thus do not have an alpha phase, but just the single beta phase. Therefore, in certain embodiments, the term half-life as used herein refers to the half-life of the polypeptide in the β-phase. The typical 13 phase half-life of a human antibody in humans is 21 days.

[0098] The term “linked” as used herein refers to a first amino acid sequence or nucleotide sequence covalently or non-covalently joined to a second amino acid sequence or nucleotide sequence, respectively. The first amino acid or nucleotide sequence can be directly joined or juxtaposed to the second amino acid or nucleotide sequence or alternatively an intervening sequence can covalently join the first sequence to the second sequence. The term “linked” means not only a fusion of a first amino acid sequence to a second amino acid sequence at the C-terminus or the N-terminus, but also includes insertion of the whole first amino acid sequence (or the second amino acid sequence) into any two amino acids in the second amino acid sequence (or the first amino acid sequence, respectively). In one embodiment, the first amino acid sequence can be linked to a second amino acid sequence by a peptide bond or a linker. The first nucleotide sequence can be linked to a second nucleotide sequence by a phosphodiester bond or a linker. The linker can be a peptide or a polypeptide (for polypeptide chains) or a nucleotide or a nucleotide chain (for nucleotide chains) or any chemical moiety (for both polypeptide and polynucleotide chains). The term “linked” is also indicated by a hyphen (-).

[0099] As used herein the term “associated with” refers to a covalent or non-covalent bond formed between a first amino acid chain and a second amino acid chain. In one embodiment, the term “associated with” means a covalent, non-peptide bond or a non-covalent bond. This association can be indicated by a colon, i.e., (:). In another embodiment, it means a covalent bond except a peptide bond. For example, the amino acid cysteine comprises a thiol group that can form a disulfide bond or bridge with a thiol group on a second cysteine residue. In most naturally occurring IgG molecules, the CH1 and CL regions are associated by a disulfide bond and the two heavy chains are associated by two disulfide bonds at positions corresponding to 239 and 242 using the Kabat numbering system (position 226 or 229, EU numbering system). Examples of covalent bonds include, but are not limited to, a peptide bond, a metal bond, a hydrogen bond, a disulfide bond, a sigma bond, a pi bond, a delta bond, a glycosidic bond, an agnostic bond, a bent bond, a dipolar bond, a Pi backbond, a double bond, a triple bond, a quadruple bond, a quintuple bond, a sextuple bond, conjugation, hyperconjugation, aromaticity, hapticity, or antibonding. Non-limiting examples of non-covalent bond include an ionic bond (e.g., cation-pi bond or salt bond), a metal bond, an hydrogen bond (e.g., dihydrogen bond, dihydrogen complex, low-barrier hydrogen bond, or symmetric hydrogen bond), van der Walls force, London dispersion force, a mechanical bond, a halogen bond, aurophilicity, intercalation, stacking, entropic force, or chemical polarity.

[0100] The term “monomer-dimer hybrid” used herein refers to a chimeric protein comprising a first polypeptide chain and a second polypeptide chain, which are associated with each other by a disulfide bond, wherein the first chain comprises a clotting factor, e.g., Factor VIII, and a first Fc region and the second chain comprises, consists essentially of, or consists of a second Fc region without the clotting factor. The monomer-dimer hybrid construct thus is a hybrid comprising a monomer aspect having only one clotting factor and a dimer aspect having two Fc regions.

[0101] As used herein, the term “cleavage site” or “enzymatic cleavage site” refers to a site recognized by an enzyme. Certain enzymatic cleavage sites comprise an intracellular processing site. In one embodiment, a polypeptide has an enzymatic cleavage site cleaved by an enzyme that is activated during the clotting cascade, such that cleavage of such sites occurs at the site of clot formation. Exemplary such sites include, e.g., those recognized by thrombin, Factor XIa or Factor Xa. Exemplary FXIa cleavage sites include, e.g., TQSFNDFTR (SEQ ID NO: 1) and SVSQTSKLTR (SEQ ID NO: 3). Exemplary thrombin cleavage sites include, e.g., DFLAEGGGVR (SEQ ID NO: 4), TTKIKPR (SEQ ID NO: 5), LVPRG (SEQ ID NO: 6), ALRPR (SEQ ID NO: 7), ISDKNTGDYYEDSYEDISAYLLSKNNAIEPRSFS (SEQ ID NO: 106), DKNTGDYYEDSYEDISAYLLSKNNAIEPRSFS (SEQ ID NO: 88), and IEPRSFS (SEQ ID NO: 194). Other enzymatic cleavage sites are known in the art and described in elsewhere herein.

[0102] As used herein, the term “processing site” or “intracellular processing site” refers to a type of enzymatic cleavage site in a polypeptide which is a target for enzymes that function after translation of the polypeptide. In one embodiment, such enzymes function during transport from the Golgi lumen to the trans-Golgi compartment. Intracellular processing enzymes cleave polypeptides prior to secretion of the protein from the cell. Examples of such processing sites include, e.g., those targeted by the PACE/furin (where PACE is an acronym for Paired basic Amino acid Cleaving Enzyme) family of endopeptidases. These enzymes are localized to the Golgi membrane and cleave proteins on the carboxyterminal side of the sequence motif Arg-[any residue]-(Lys or Arg)-Arg. As used herein the “furin” family of enzymes includes, e.g., PCSK1 (also known as PC1/Pc3), PCSK2 (also known as PC2), PCSK3 (also known as furin or PACE), PCSK4 (also known as PC4), PCSK5 (also known as PC5 or PC6), PCSK6 (also known as PACE4), or PCSK7 (also known as PC7/LPC, PC8, or SPC7). Other processing sites are known in the art.

[0103] In constructs that include more than one processing or cleavage site, it will be understood that such sites may be the same or different.

[0104] The term “Furin” refers to the enzymes corresponding to EC No. 3.4.21.75. Furin is subtilisin-like proprotein convertase, which is also known as PACE (Paired basic Amino acid Cleaving Enzyme). Furin deletes sections of inactive precursor proteins to convert them into biologically active proteins. During its intracellular transport, pro-peptide of VWF can be cleaved from mature VWF molecule by a Furin enzyme. In some embodiments, Furin cleaves the D1D2 from the D′D3 of VWF. In other embodiments, a nucleotide sequence encoding Furin can be expressed together with the nucleotide sequence encoding a VWF fragment so that D1D2 domains can be cleaved off intracellularly by Furin.

[0105] In constructs that include more than one processing or cleavage site, it will be understood that such sites may be the same or different.

[0106] A “processable linker” as used herein refers to a linker comprising at least one intracellular processing site, which are described elsewhere herein.

[0107] Hemostatic disorder, as used herein, means a genetically inherited or acquired condition characterized by a tendency to hemorrhage, either spontaneously or as a result of trauma, due to an impaired ability or inability to form a fibrin clot. Examples of such disorders include the hemophilias. The three main forms are hemophilia A (factor VIII deficiency), hemophilia B (factor IX deficiency or “Christmas disease”) and hemophilia C (factor XI deficiency, mild bleeding tendency). Other hemostatic disorders include, e.g., Von Willebrand disease, Factor XI deficiency (PTA deficiency), Factor XII deficiency, deficiencies or structural abnormalities in fibrinogen, prothrombin, Factor V, Factor VII, Factor X or factor XIII, Bernard-Soulier syndrome, which is a defect or deficiency in GPIb. GPIb, the receptor for VWF, can be defective and lead to lack of primary clot formation (primary hemostasis) and increased bleeding tendency), and thrombasthenia of Glanzman and Naegeli (Glanzmann thrombasthenia). In liver failure (acute and chronic forms), there is insufficient production of coagulation factors by the liver; this may increase bleeding risk.

[0108] The chimeric molecules of the invention can be used prophylactically. As used herein the term “prophylactic treatment” refers to the administration of a molecule prior to a bleeding episode. In one embodiment, the subject in need of a general hemostatic agent is undergoing, or is about to undergo, surgery. The chimeric protein of the invention can be administered prior to or after surgery as a prophylactic. The chimeric protein of the invention can be administered during or after surgery to control an acute bleeding episode. The surgery can include, but is not limited to, liver transplantation, liver resection, dental procedures, or stem cell transplantation.

[0109] The chimeric protein of the invention is also used for on-demand treatment. The term “on-demand treatment” refers to the administration of a chimeric molecule in response to symptoms of a bleeding episode or before an activity that may cause bleeding. In one aspect, the on-demand treatment can be given to a subject when bleeding starts, such as after an injury, or when bleeding is expected, such as before surgery. In another aspect, the on-demand treatment can be given prior to activities that increase the risk of bleeding, such as contact sports.

[0110] As used herein the term “acute bleeding” refers to a bleeding episode regardless of the underlying cause. For example, a subject may have trauma, uremia, a hereditary bleeding disorder (e.g., factor VII deficiency) a platelet disorder, or resistance owing to the development of antibodies to clotting factors.

[0111] Treat, treatment, treating, as used herein refers to, e.g., the reduction in severity of a disease or condition; the reduction in the duration of a disease course; the amelioration of one or more symptoms associated with a disease or condition; the provision of beneficial effects to a subject with a disease or condition, without necessarily curing the disease or condition, or the prophylaxis of one or more symptoms associated with a disease or condition. In one embodiment, the term “treating” or “treatment” means maintaining a FVIII trough level at least about 1 IU/dL, 2 IU/dL, 3 IU/dL, 4 IU/dL, 5 IU/dL, 6 IU/dL, 7 IU/dL, 8 IU/dL, 9 IU/dL, 10 IU/dL, 11 IU/dL, 12 IU/dL, 13 IU/dL, 14 IU/dL, 15 IU/dL, 16 IU/dL, 17 IU/dL, 18 IU/dL, 19 IU/dL, or 20 IU/dL in a subject by administering a chimeric protein or a VWF fragment of the invention. In another embodiment, treating or treatment means maintaining a FVIII trough level between about 1 and about 20 IU/dL, about 2 and about 20 IU/dL, about 3 and about 20 IU/dL, about 4 and about 20 IU/dL, about 5 and about 20 IU/dL, about 6 and about 20 IU/dL, about 7 and about 20 IU/dL, about 8 and about 20 IU/dL, about 9 and about 20 IU/dL, or about 10 and about 20 IU/dL. Treatment or treating of a disease or condition can also include maintaining FVIII activity in a subject at a level comparable to at least about 1%, 2%, 3%, 4%, 5%, 6%, 7%, 8%, 9%, 10%, 11%, 12%, 13%, 14%, 15%, 16%, 17%, 18%, 19%, or 20% of the FVIII activity in a non-hemophiliac subject. The minimum trough level required for treatment can be measured by one or more known methods and can be adjusted (increased or decreased) for each person.

### II. CHIMERIC PROTEINS

[0112] The present invention is directed to extending a half-life of a chimeric protein using a VWF protein fused to an XTEN sequence by preventing or inhibiting a FVIII half-life limiting factor, i.e., endogenous VWF, from associating with the FVIII protein. Endogenous VWF associates with about 95% to about 98% of FVIII in non-covalent complexes. While endogenous VWF is a FVIII half-life limiting factor, endogenous VWF bound to a FVIII protein is also known to protect FVIII in various ways. For example, full length VWF (as a multimer having about 250 kDa) can protect FVIII from protease cleavage and FVIII activation, stabilize the FVIII heavy chain and/or light chain, and prevent clearance of FVIII by scavenger receptors. But, at the same time, endogenous VWF limits the FVIII half-life by preventing pinocytosis and by clearing FVIII-VWF complex from the system through the VWF clearance pathway. It is believed, while not bound by a theory, that endogenous VWF is a half-life limiting factor that prevents the half-life of a chimeric protein fused to a half-life extender from being longer than about two-fold that of wild-type FVIII. Therefore, the present invention is directed to preventing or inhibiting interaction between endogenous VWF and a FVIII protein using a VWF protein comprising a D′ domain and a D3 domain (e.g., a VWF fragment) and at the same time to increasing a half-life of resulting FVIII protein(s) by using an XTEN sequence in combination with an Ig constant region or a portion thereof. In particular, the present invention shows that a shorter XTEN sequence (i.e., XTEN that contains less than 288 amino acids in length, i.e., XTEN that is shorter than 288 amino acids) is better in extending a half-life of the chimeric protein.

[0113] In one embodiment, the invention is directed to a chimeric protein comprising (i) a first polypeptide which comprises a FVIII protein fused to a first Ig constant region or a portion thereof and (ii) a second polypeptide which comprises a VWF protein comprising a D′ domain and a D3 domain of VWF fused to a second Ig constant region or a portion thereof by an XTEN sequence in-between, wherein the XTEN sequence contains less than 288 amino acid residues and wherein the first polypeptide is linked to or associated with the second polypeptide. In another embodiment, the XTEN sequence in the second polypeptide consists of an amino acid sequence having a length of between 12 amino acids and 287 amino acids. In other embodiments, the chimeric protein exhibits a longer half-life compared to a corresponding fusion protein comprising the first polypeptide and the second polypeptide, wherein the second polypeptide comprises an XTEN sequence containing at least 288 amino acids, e.g., AE288, e.g., SEQ ID NO: 8. In still other embodiments, the XTEN sequence in the second polypeptide contains at least about 36, at least about 42, at least about 72, or at least about 144 amino acids, but less than 288 amino acids, e.g., AE42, AE72, AE144 (AE144, AE144_2A, AE144_3B, AE144_4A, AE144_5A, AE144_6B), AG42, AG72, or AG144 (AG144, AG144_A, AG144_B, AG144_C, AG144_F), e.g., SEQ ID NO: 9, SEQ ID NO: 10, SEQ ID NO: 11, SEQ ID NO: 55; SEQ ID NO: 56; SEQ ID NO: 57; SEQ ID NO: 58; SEQ ID NO: 59; SEQ ID NO: 14; SEQ ID NO: 60; SEQ ID NO: 61; SEQ ID NO: 62; or SEQ ID NO: 63.

[0114] The chimeric protein of the invention can further comprise a second XTEN sequence which links the FVIII protein with the first Ig constant region or a portion thereof.

[0115] In certain embodiments, the invention is directed to a chimeric protein comprising (i) a first polypeptide which comprises a FVIII protein fused to a first Ig constant region or a portion thereof and (ii) a second polypeptide which comprises a VWF protein comprising a D′ domain and a D3 domain of VWF fused to a second Ig constant region or a portion thereof by a first XTEN sequence in-between, wherein the XTEN sequence contains less than 288 amino acid residues and wherein the first polypeptide are linked to or associated with the second polypeptide, and wherein the first polypeptide further comprises a second XTEN sequence which is inserted at one or more insertion sites within the FVIII protein or which is fused to the FVIII protein and/or the first Ig constant region or a portion thereof. Therefore, in one embodiment, a second XTEN sequence is inserted at one or more insertion sites within the FVIII protein. In another embodiment, a second XTEN sequence is fused to the FVIII protein and/or the first Ig constant region or a portion thereof. In other embodiments, a second XTEN sequence is inserted at one or more insertion sites within the FVIII protein and a third XTEN sequence is fused to the FVIII protein and/or the first Ig constant region or a portion thereof.

[0116] The second and/or third XTEN sequences can be any length of XTEN amino acids. For example, the second and/or third XTEN sequences are disclosed elsewhere herein, e.g., AE42, AE72, AE864, AE576, AE288, AE144, AG864, AG576, AG288, and AG144, e.g., SEQ ID NO: 8; SEQ ID NO: 9, SEQ ID NO: 10, SEQ ID NO: 11, SEQ ID NO: 17; SEQ ID NO: 54; SEQ ID NO: 19; SEQ ID NO: 16; SEQ ID NO: 18; SEQ ID NO: 15; SEQ ID NO: 55; SEQ ID NO: 56; SEQ ID NO: 57; SEQ ID NO: 58; SEQ ID NO: 59; SEQ ID NO: 14; SEQ ID NO: 60; SEQ ID NO: 61; SEQ ID NO: 62; or SEQ ID NO: 63. In a particular embodiment, the second and/or third XTEN sequence is AE288 or AG288, e.g., SEQ ID NO: 8 or 19.

[0117] In certain embodiments, the invention is directed to a chimeric protein comprising (i) a first polypeptide which comprises a FVIII protein fused to a first Ig constant region or a portion thereof by an optional linker, wherein an optional XTEN sequence (X2) is inserted at one or more insertion sites within the FVIII protein or is fused to the FVIII protein or to the first Ig constant region or a portion thereof, and (ii) a second polypeptide which comprises a VWF protein comprising a D′ domain and a D3 domain of VWF fused to a second Ig constant region or a portion thereof by an XTEN sequence (X1) between the VWF protein and the second Ig constant region or a portion thereof, wherein the XTEN sequence (X1) contains less than 288 amino acid residues and is fused to the VWF protein by a linker and wherein the first polypeptide and the second polypeptide are associated. In some embodiments, the invention is directed to a chimeric protein comprising (i) a first polypeptide which comprises a FVIII protein fused to a first Ig constant region or a portion thereof by an optional linker, wherein an optional XTEN sequence (X2) is inserted at one or more insertion sites within the FVIII protein or is fused to the FVIII protein or to the first Ig constant region or a portion thereof, and (ii) a second polypeptide which comprises a VWF protein comprising a D′ domain and a D3 domain of VWF fused to a second Ig constant region or a portion thereof by an XTEN sequence (X1) between the VWF protein and the second Ig constant region or a portion thereof, wherein the XTEN sequence (X1) contains less than 288 amino acid residues and is fused to the second Ig constant region or a portion thereof by a linker and wherein the first polypeptide and the second polypeptide are associated. In other embodiments, the linker fusing the XTEN sequence (X1) with the VWF protein or the second Ig constant region or a portion thereof is a cleavable linker. Non-limiting examples of the cleavable linkers are shown elsewhere herein. In a particular embodiment, the linker is a thrombin cleavable linker.

[0118] In some embodiments, the chimeric protein is two polypeptide chains, the first chain comprising the first polypeptide described above and the second chain comprising the second polypeptide described above. For example, the two polypeptide chains comprise (i) a first chain comprising a single chain FVIII protein, a first Ig constant region or a portion thereof, and an optional XTEN sequence which is inserted at one or more insertion sites within the FVIII protein or is fused to the FVIII protein or to the first Ig constant region or a portion thereof, and (ii) a second chain comprising a VWF protein fused to a second Ig constant region or a portion thereof by an XTEN sequence (X1) in-between, wherein the XTEN sequence (X1) contains less than 288 amino acids.

[0119] In certain embodiments, the chimeric protein is two polypeptide chains, a first chain comprising a heavy chain of a FVIII protein and a second chain comprising, from N-terminus to C-terminus, a light chain of a FVIII protein, an optional XTEN sequence which is inserted at one or more insertion sites within the FVIII protein or is fused to the FVIII protein or to the first Ig constant region or a portion thereof, and a first Ig constant region or a portion thereof, an optional linker (e.g., a processable linker), a VWF protein, an XTEN sequence (X1), a second optional linker (e.g., a cleavable linker), and a second Ig constant region or a portion thereof.

[0120] In other embodiments, the chimeric protein is three polypeptide chains, (i) a first chain comprising a heavy chain of a FVIII protein, (ii) a second chain comprising a light chain of a FVIII protein, a first Ig constant region or a portion thereof, and an optional XTEN sequence which is inserted at one or more insertion sites within the heavy chain or the light chain of the FVIII protein or is fused to the FVIII protein or to the first Ig constant region or a portion thereof, and (iii) a third chain comprising a VWF protein fused to a second Ig constant region or a portion thereof by an XTEN sequence (X1) in-between, wherein the first chain and the second chain are associated by a non-covalent bond, e.g., a metal bond, and the second chain and the third chain are associated by a covalent bond, e.g., a disulfide bond.

[0121] In still other embodiments, the chimeric protein is a single chain comprising, from N terminus to C terminus, a single chain FVIII protein, an optional XTEN sequence which is inserted at one or more insertion sites within the FVIII protein or is fused to the FVIII protein or to the first Ig constant region or a portion thereof, and a first Ig constant region or a portion thereof, an optional linker (e.g., a processable linker), a VWF protein, an XTEN sequence (X1), a second optional linker (e.g., a cleavable linker), and a second Ig constant region or a portion thereof.

[0122] In certain embodiments, a chimeric protein comprises one of the following formulae (a)-(hh):

### (a) FVIII-F1:F2-L2-X-L1-V;

### (b) FVIII-F1:V-L1-X-L2-F2;

### (c) F1-FVIII:F2-L2-X-L1-V;

### (d) F1-FVIII:V-L1-X-L2-F2;

### (e) FVIII-X2-F1:F2-L2-X1-L1-V;

### (f) FVIII-X2-F1:V-L1-X1-L2-F2;

### (g) FVIII(X2)-F1:F2-L2-X1-L1-V;

### (h) FVIII(X2)-F1:V-L1-X1-L2-F2;

### (i) F1-X2-F1:F2-L2-X1-L1-V;

### (j) F1-X2-F1:V-L1-X1-L2-F2;

### (k) V-L1-X-L2-F2-L3-FVIII-L4-F1;

### (1) V-L1-X-L2-F2-L3-F1-L4-FVIII;

### (m) F1-L4-FVIII-L3-F2-L2-X-L1-V;

### (n) FVIII-L4-F1-L3-F2-L2-X-L1-V;

### (o) FVIII-L4-F1-L3-V-L1-X-L2-F2;

### (p) FVIII-L4-F1-L3-F2-L2-X-L1-V;

### (q) F2-L2-X-L1-V-L3-F1-L4-FVIII;

### (r) F2-L2-X-L1-V-L3-FVIII-L4-F1;

### (s) V-L1-X1-L2-F2-L3-FVIII(X2)-L4-F1;

### (t) V-L1-X1-L2-F2-L3-F1-L4-FVIII(X2);

### (u) F1-L4-FVIII(X2)-L3-F2-L2-X1-L1-V;

### (v) F-L4-FVIII(X2)-L3-V-L1-X1-L2-F2;

### (w) FVIII(X2)-L4-F1-L3-V-L1-X1-L2-F2;

### (x) FVIII(X2)-L4-F1-L3-F2-L2-X1-L1-V;

### (y) F2-L2-X1-L1-V-L3-F1-L4-FVIII(X2);

### (z) F2-L2-X1-L1-V-L3-FVIII(X2)-L4-F1;

### (aa) V-L1-X2-L2-F2-L3-FVIII-L4-X2-L5-F1;

### (bb) V-L1-X2-L2-F2-L3-F1-L5-X2-L4-FVIII;

### (cc) F1-L5-X2-L4-FVIII-L3-F2-L2-X2-L1-V;

### (dd) F1-L5-X2-L4-FVIII-L3-V-L1-X2-L2-F2;

### (ee) FVIII-L5-X2-L4-F2-L3-V-L1-X1-L2-F1;

### (ff) FVIII-L5-X2-L4-F2-L3-F1-L2-X1-L1-V;

### (gg) F1-L2-X1-L1-V-L3-F2-L4-X2-L5-FVIII; or

### (hh) F1-L2-X1-L1-V-L3-FVIII-L5-X2-L4-F2;

[0123] wherein V is a VWF protein, which comprises a D′ domain and a D3 domain,
X or X1 is a first XTEN sequence that contains less than 288 amino acids,
X2 is a second XTEN sequence,
FVIII comprises a FVIII protein,
FVIII(X2) comprises a FVIII protein having a second XTEN sequence inserted in one or more insertion sites within the FVIII protein,
F1 is a first Ig constant region or a portion thereof,
F2 is a second Ig constant region or a portion thereof,
L1, L2, L3, L4, or L5 is an optional linker,
(-) is a peptide bond; and
(:) is a covalent bond or a non-covalent bond.

[0124] In one embodiment, the X or X1 consists of an amino acid sequence having a length of between 12 amino acids and 287 amino acids. In another embodiment, the chimeric protein exhibits a longer half-life compared to a corresponding fusion protein comprising a formula wherein the X or X1 is AE288, e.g., SEQ ID NO: 8.

[0125] In other embodiments, the X or X1 in the formula contains at least about 36, at least about 42, at least about 72, or at least about 144 amino acids, but less than 288 amino acids, e.g., AE42, AE72, AE144 (AE144, AE144_2A, AE144_3B, AE144_4A, AE144_5A, AE144_6B), AG42, AG72, or AG144 (AG144, AG144_A, AG144_B, AG144_C, AG144_F), e.g., SEQ ID NO: 9, SEQ ID NO: 10, SEQ ID NO: 11, SEQ ID NO: 55; SEQ ID NO: 56; SEQ ID NO: 57; SEQ ID NO: 58; SEQ ID NO: 59; SEQ ID NO: 14; SEQ ID NO: 60; SEQ ID NO: 61; SEQ ID NO: 62; or SEQ ID NO: 63.

[0126] In yet other embodiments, the X2 comprises an amino acid sequence having a length of at least about 36 amino acids, at least 42 amino acids, at least 144 amino acids, at least 288 amino acids, at least 576 amino acids, or at least 864 amino acids, e.g., AE42, AE72, AE864, AE576, AE288, AE144, AG864, AG576, AG288, or AG144, e.g., SEQ ID NO: 9; SEQ ID NO: 10; SEQ ID NO: 15; SEQ ID NO: 16; SEQ ID NO: 8; SEQ ID NO: 11; SEQ ID NO: 17; SEQ ID NO: 18, SEQ ID NO: 19, or SEQ ID NO: 14. In a particular embodiment, the X2 is AE288 or AG288, e.g., SEQ ID NO: 8 or 19.

[0127] In certain embodiments, the chimeric protein comprising the X or X1 and/or X2 has an extended half-life compared to a chimeric protein without the X or X1 and/or X2. In other embodiments, the L1 and/or L2 is a cleavable linker. In still other embodiments, the L4 and/or L5 is a cleavable linker.

### ILA. Von Willebrand Factor (VWF) Proteins

[0128] VWF (also known as F8VWF) is a large multimeric glycoprotein present in blood plasma and produced constitutively in endothelium (in the Weibel-Palade bodies), megakaryocytes (a-granules of platelets), and subendothelian connective tissue. The basic VWF monomer is a 2813 amino acid protein. Every monomer contains a number of specific domains with a specific function, the D′/D3 domain (which binds to Factor VIII), the A1 domain (which binds to platelet GPIb-receptor, heparin, and/or possibly collagen), the A3 domain (which binds to collagen), the C1 domain (in which the RGD domain binds to platelet integrin αIIbβ3 when this is activated), and the “cysteine knot” domain at the C-terminal end of the protein (which VWF shares with platelet-derived growth factor (PDGF), transforming growth factor-β (TGFβ) and β-human chorionic gonadotropin (βHCG)).

[0129] In one embodiment, the VWF protein is a VWF fragment. The term “a VWF fragment” as used herein includes, but is not limited to, functional VWF fragments comprising a D′ domain and a D3 domain, which are capable of inhibiting binding of endogenous VWF to FVIII. In one embodiment, the VWF fragment binds to the FVIII protein. In another embodiment, the VWF fragment blocks the VWF binding site on the FVIII protein, thereby inhibiting interaction of the FVIII protein with endogenous VWF. The VWF fragments include derivatives, variants, mutants, or analogues that retain these activities of VWF.

[0130] The 2813 monomer amino acid sequence for human VWF is reported as Accession Number_NP_000543.2 in Genbank. The nucleotide sequence encoding the human VWF is reported as Accession Number NM_000552.3_{—} in Genbank. A nucleotide sequence of human VWF is designated as SEQ ID NO: 20. SEQ ID NO: 21 is the amino acid sequence of full-length VWF. Each domain of VWF is listed in Table 1.

TABLE 1
VWF Sequences

| VWF domains | | | |
|---|---|---|---|
| | Amino acid Sequence | | |
| VWF Signal Peptide | 1 | MIPARFAGVL LALALILPGT LC | 22 |
| (Amino acids 1 to 22 of | | | |
| SEQ ID NO: 21) | | | |
| VWF D1D2 region | | AEGTRGRS STARCSLFGS | |
| (Amino acids 23 to 763 | | DFVNTFDGSM | |
| of SEQ ID NO: 21) | | | |
| | 51 | YSFAGYCSYL LAGGCQKRSF SIIGDFQNGK RVSLSVYLGE | |
| | | FFDIHLFVNG | |
| | 101 | TVTQGDQRVS MPYASKGLYL ETEAGYYKLS GEAYGFVARI | |
| | | DGSGNFQVLL | |
| | 151 | SDRYFNKTCG LCGNFNIFAE DDFMTQEGTL TSDPYDFANS | |
| | | WALSSGEQWC | |
| | 201 | ERASPPSSSC NISSGEMQKG LWEQCQLLKS TSVFARCHPL | |
| | | VDPEPFVALC | |
| | 251 | EKTLCECAGG LECACPALLE YARTCAQEGM VLYGWTDHSA | |
| | | CSPVCPAGME | |
| | 301 | YRQCVSPCAR TCQSLHINEM CQERCVDGCS CPEGQLLDEG | |
| | | LCVESTECPC | |
| | 351 | VHSGKRYPPG TSLSRDCNTC ICRNSQWICS NEECPGECLV | |
| | | TGQSHFKSFD | |
| | 401 | NRYFTFSGIC QYLLARDCQD HSFSIVIETV QCADDRDAVC | |
| | | TRSVTVRLPG | |
| | 451 | LHNSLVKLKH GAGVAMDGQD IQLPLLKGDL RIQHTVTASV | |
| | | RLSYGEDLQM | |
| | 501 | DWDGRGRLLV KLSPVYAGKT CGLCGNYNGN QGDDFLTPSG | |
| | | LAEPRVEDFG | |
| | 551 | NAWKLHGDCQ DLQKQHSDPC ALNPRMTRFS EEACAVLTSP | |
| | | TFEACHRAVS | |
| | 601 | PLPYLRNCRY DVCSCSDGRE CLCGALASYA AACAGRGVRV | |
| | | AWREPGRCEL | |
| | 651 | NCPKGQVYLQ CGTPCNLTCR SLSYPDEECN EACLEGCFCP | |
| | | PGLYMDERGD | |
| | 701 | CVPKAQCPCY YDGEIFQPED IFSDHHTMCY CEDGFMHCTM | |
| | | SGVPGSLLPD | |
| | 751 | AVLSSPLSHR SKR | 763 |
| VWF D′ Domain | 764 | SLSCRPP MVKLVCPADN LRAEGLECTK | |
| | | TCQNYDLECM | |
| | 801 | SMGCVSGCLC PPGMVRHENR CVALERCPCF HQGKEYAPGE | |
| | | TVKIGCNTCV | |
| | 851 | CRDRKWNCTD HVCDAT | 866 |
| VWF D3 Domain | 867 | [chemical structure] | |
| | 901 | [chemical structure] | |
| | | [chemical structure] | |
| | 951 | [chemical structure] | |
| | | [chemical structure] | |
| | 1001 | [chemical structure] | |
| | | [chemical structure] | |
| | 1051 | [chemical structure] | |
| | | [chemical structure] | |
| | 1101 | [chemical structure] | |
| | | [chemical structure] | |
| | 1151 | [chemical structure] | |
| | | [chemical structure] | |
| | 1201 | [chemical structure] | |
| | 1240 | | |
| VWF A1 Domain | 1241 | GGLVVPPTDA | |
| | 1251 | PVSPTTLYVE DISEPPLHDF YCSRLLDLVF LLDGSSRLSE | |
| | | AEFEVLKAFV | |
| | 1301 | VDMMERLRIS QKWVRVAVVE YHDGSHAYIG LKDRKRPSEL | |
| | | RRIASQVKYA | |
| | 1351 | GSQVASTSEV LKYTLFQIFS KIDRPEASRI ALLLMASQEP | |
| | | QRMSRNFVRY | |
| | 1401 | VQGLKKKKVI VIPVGIGPHA NLKQIRLIEK QAPENKAFVL | |
| | | SSVDELEQQR | |
| | 1451 | DEIVSYLCDL APEAPPPTLP PDMAQVTVG | 1479 |
| | 1480 | P GLLGVSTLGP KRNSMVLDVA | |
| | 1501 | FVLEGSDKIG EADFNRSKEF MEEVIQRMDV GQDSIHVTVL | |
| | | QYSYMVTVEY | |
| | 1551 | PFSEAQSKGD ILQRVREIRY QGGNRTNTGL ALRYLSDHSF | |
| | | LVSQGDREQA | 1600 |
| | 1601 | PNLVYMVTGN PASDEIKRLP GDIQVVPIGV GPNANVQELE | |
| | | RIGWPNAPIL | |
| | 1651 | IQDFETLPRE APDLVLQRCC SGEGLQIPTL SPAPDCSQPL | |
| | | DVILLLDGSS | |
| | 1701 | SFPASYFDEM KSFAKAFISK ANIGPRLTQV SVLQYGSITT | |
| | | IDVPWNVVPE | |
| | 1751 | KAHLLSLVDV MQREGGPSQI GDALGFAVRY LTSEMHGARP | |
| | | GASKAVVILV | |
| | 1801 | TDVSVDSVDA AADAARSNRV TVFPIGIGDR YDAAQLRILA | |
| | | GPAGDSNVVK | |
| | 1851 | LQRIEDLPTM VTLGNSFLHK LCSGFVRICM DEDGNEKRPG | |
| | | DVWTLPDQCH | |
| | 1901 | TVTCQPDGQT LLKSHRVNCD RGLRPSCPNS QSPVKVEETC | |
| | | GCRWTCPCVC | |
| | 1951 | TGSSTRHIVT FDGQNFKLTG SCSYVLFQNK EQDLEVILHN | |
| | | GACSPGARQG | |
| | 2001 | CMKSIEVKHS ALSVEXHSDM EVTVNGRLVS VPYVGGNMEV | |
| | | NVYGAIMHEV | |
| | 2051 | RFNHLGHIFT FTPQNNEFQL QLSPKTFASK TYGLCGICDE | |
| | | NGANDFMLRD | |
| | 2101 | GTVTTDWKTL VQEWTVQRPG QTCQPILEEQ CLVPDSSHCQ | |
| | | VLLLPLFAEC | |
| | 2151 | HKVLAPATFY AICQQDSCHQ EQVCEVIASY AHLCRTNGVC | |
| | | VDWRTPDFCA | |
| | 2201 | MSCPPSLVYN HCEHGCPRHC DGNVSSCGDH PSEGCFCPPD | |
| | | KVMLEGSCVP | |
| | 2251 | EEACTQCIGE DGVQHQFLEA WVPDHQPCQI CTCLSGRKVN | |
| | | CTTQPCPTAK | |
| | 2301 | APTCGLCEVA RLRQNADQCC PEYECVCDPV SCDLPPVPHC | |
| | | ERGLQPTLTN | |
| | 2351 | PGECRPNFTC ACRKEECKRV SPPSCPPHRL PTLRKTQCCD | |
| | | EYECACNCVN | |
| | 2401 | STVSCPLGYL ASTATNDCGC TTTTCLPDKV CVHRSTIYPV | |
| | | GQFWEEGCDV | |
| | 2451 | CTCTDMEDAV MGLRVAQCSQ KPCEDSCRSG FTYVLHEGEC | |
| | | CGRCLPSACE | |
| | 2501 | VVTGSPRGDS QSSWKSVGSQ WASPENPCLI NECVRVKEEV | |
| | | FIQQRNVSCP | |
| | 2551 | QLEVPVCPSG FQLSCKTSAC CPSCRCERME ACMLNGTVIG | |
| | | PGKTVMIDVC | |
| | 2601 | TTCRCMVQVG VISGFKLECR KTTCNPCPLG YKEENNTGEC | |
| | | CGRCLPTACT | |
| | 2651 | IQLRGGQIMT LKRDETLQDG CDTHFCKVNE RGEYFWEKRV | |
| | | TGCPPFDEHK | |
| | 2701 | CLAEGGKIMK IPGTCCDTCE EPECNDITAR LQYVKVGSCK | |
| | | SEVEVDIHYC | |
| | 2751 | QGKCASKAMY SIDINDVQDQ CSCCSPTRTE PMQVALHCTN | |
| | | GSVVYHEVLN | |
| | 2801 | AMECKCSPRK CSK | |
| | Nucleotide Sequence (SEQ ID NO: 20) | | |
| Full-length VWF | 1 | ATGATTCCTG CCAGATTTGC CGGGGTGCTG CTTGCTCTGG | |
| | | CCCTCATTTT | |
| | 51 | GCCAGGGACC CTTTGTGCAG AAGGAACTCG CGGCAGGTCA | |
| | | TCCACGGCCC | |
| | 101 | GATGCAGCCT TTTCGGAAGT GACTTCGTCA ACACCTTTGA | |
| | | TGGGAGCATG | |
| | 151 | TACAGCTTTG CGGGATACTG CAGTTACCTC CTGGCAGGGG | |
| | | GCTGCCAGAA | |
| | 201 | ACGCTCCTTC TCGATTATTG GGGACTTCCA GAATGGCAAG | |
| | | AGAGTGAGCC | |
| | 251 | TCTCCGTGTA TCTTGGGGAA TTTTTTGACA TCCATTTGTT | |
| | | TGTCAATGGT | |
| | 301 | ACCGTGACAC AGGGGGACCA AAGAGTCTCC ATGCCCTATG | |
| | | CCTCCAAAGG | |
| | 351 | GCTGTATCTA GAAACTGAGG CTGGGTACTA CAAGCTGTCC | |
| | | GGTGAGGCCT | |
| | 401 | ATGGCTTTGT GGCCAGGATC GATGGCAGCG GCAACTTTCA | |
| | | AGTCCTGCTG | |
| | 451 | TCAGACAGAT ACTTCAACAA GACCTGCGGG CTGTGTGGCA | |
| | | ACTTTAACAT | |
| | 501 | CTTTGCTGAA GATGACTTTA TGACCCAAGA AGGGACCTTG | |
| | | ACCTCGGACC | |
| | 551 | CTTATGACTT TGCCAACTCA TGGGCTCTGA GCAGTGGAGA | |
| | | ACAGTGGTGT | |
| | 601 | GAACGGGCAT CTCCTCCCAG CAGCTCATGC AACATCTCCT | |
| | | CTGGGGAAAT | |
| | 651 | GCAGAAGGGC CTGTGGGAGC AGTGCCAGCT TCTGAAGAGC | |
| | | ACCTCGGTGT | |
| | 701 | TTGCCCGCTG CCACCCTCTG GTGGACCCCG AGCCTTTTGT | |
| | | GGCCCTGTGT | |
| | 751 | GAGAAGACTT TGTGTGAGTG TGCTGGGGGG CTGGAGTGCG | |
| | | CCTGCCCTGC | |
| | 801 | CCTCCTGGAG TACGCCCGGA CCTGTGCCCA GGAGGGAATG | |
| | | GTGCTGTACG | |
| | 851 | GCTGGACCGA CCACAGCGCG TGCAGCCCAG TGTGCCCTGC | |
| | | TGGTATGGAG | |
| | 901 | TATAGGCAGT GTGTGTCCCC TTGCGCCAGG ACCTGCCAGA | |
| | | GCCTGCACAT | |
| | 951 | CAATGAAATG TGTCAGGAGC GATGCGTGGA TGGCTGCAGC | |
| | | TGCCCTGAGG | |
| | 1001 | GACAGCTCCT GGATGAAGGC CTCTGCGTGG AGAGCACCGA | |
| | | GTGTCCCTGC | |
| | 1051 | GTGCATTCCG GAAAGCGCTA CCCTCCCGGC ACCTCCCTCT | |
| | | CTCGAGACTG | |
| | 1101 | CAACACCTGC ATTTGCCGAA ACAGCCAGTG GATCTGCAGC | |
| | | AATGAAGAAT | |
| | 1151 | GTCCAGGGGA GTGCCTTGTC ACTGGTCAAT CCCACTTCAA | |
| | | GAGCTTTGAC | |
| | 1201 | AACAGATACT TCACCTTCAG TGGGATCTGC CAGTACCTGC | |
| | | TGGCCCGGGA | |
| | 1251 | TTGCCAGGAC CACTCCTTCT CCATTGTCAT TGAGACTGTC | |
| | | CAGTGTGCTG | |
| | 1301 | ATGACCGCGA CGCTGTGTGC ACCCGCTCCG TCACCGTCCG | |
| | | GCTGCCTGGC | |
| | 1351 | CTGCACAACA GCCTTGTGAA ACTGAAGCAT GGGGCAGGAG | |
| | | TTGCCATGGA | |
| | 1401 | TGGCCAGGAC ATCCAGCTCC CCCTCCTGAA AGGTGACCTC | |
| | | CGCATCCAGC | |
| | 1451 | ATACAGTGAC GGCCTCCGTG CGCCTCAGCT ACGGGGAGGA | |
| | | CCTGCAGATG | |
| | 1501 | GACTGGGATG GCCGCGGGAG GCTGCTGGTG AAGCTGTCCC | |
| | | CCGTCTATGC | |
| | 1551 | CGGGAAGACC TGCGGCCTGT GTGGGAATTA CAATGGCAAC | |
| | | CAGGGCGACG | |
| | 1601 | ACTTCCTTAC CCCCTCTGGG CTGGCRGAGC CCCGGGTGGA | |
| | | GGACTTCGGG | |
| | 1651 | AACGCCTGGA AGCTGCACGG GGACTGCCAG GACCTGCAGA | |
| | | AGCAGCACAG | |
| | 1701 | CGATCCCTGC GCCCTCAACC CGCGCATGAC CAGGTTCTCC | |
| | | GAGGAGGCGT | |
| | 1751 | GCGCGGTCCT GACGTCCCCC ACATTCGAGG CCTGCCATCG | |
| | | TGCCGTCAGC | |
| | 1801 | CCGCTGCCCT ACCTGCGGAA CTGCCGCTAC GACGTGTGCT | |
| | | CCTGCTCGGA | |
| | 1851 | CGGCCGCGAG TGCCTGTGCG GCGCCCTGGC CAGCTATGCC | |
| | | GCGGCCTGCG | |
| | 1901 | CGGGGAGAGG CGTGCGCGTC GCGTGGCGCG AGCCAGGCCG | |
| | | CTGTGAGCTG | |
| | 1951 | AACTGCCCGA AAGGCCAGGT GTACCTGCAG TGCGGGACCC | |
| | | CCTGCAACCT | |
| | 2001 | GACCTGCCGC TCTCTCTCTT ACCCGGATGA GGAATGCAAT | |
| | | GAGGCCTGCC | |
| | 2051 | TGGAGGGCTG CTTCTGCCCC CCAGGGCTCT ACATGGATGA | |
| | | GAGGGGGGAC | |
| | 2101 | TGCGTGCCCA AGGCCCAGTG CCCCTGTTAC TATGACGGTG | |
| | | AGATCTTCCA | |
| | 2151 | GCCAGAAGAC ATCTTCTCAG ACCATCACAC CATGTGCTAC | |
| | | TGTGAGGATG | |
| | 2201 | GCTTCATGCA CTGTACCATG AGTGGAGTCC CCGGAAGCTT | |
| | | GCTGCCTGAC | |
| | 2251 | GCTGTCCTCA GCAGTCCCCT GTCTCATCGC AGCAAAAGGA | |
| | | GCCTATCCTG | |
| | 2301 | TCGGCCCCCC ATGGTCAAGC TGGTGTGTCC CGCTGACAAC | |
| | | CTGCGGGCTG | |
| | 2351 | AAGGGCTCGA GTGTACCAAA ACGTGCCAGA ACTATGACCT | |
| | | GGAGTGCATG | |
| | 2401 | AGCATGGGCT GTGTCTCTGG CTGCCTCTGC CCCCCGGGCA | |
| | | TGGTCCGGCA | |
| | 2451 | TGAGAACAGA TGTGTGGCCC TGGAAAGGTG TCCCTGCTTC | |
| | | CATCAGGGCA | |
| | 2501 | AGGAGTATGC CCCTGGAGAA ACAGTGAAGA TTGGCTGCAA | |
| | | CACTTGTGTC | |
| | 2551 | TGTCGGGACC GGAAGTGGAA CTGCACAGAC CATGTGTGTG | |
| | | ATGCCACGTG | |
| | 2601 | CTCCACGATC GGCATGGCCC ACTACCTCAC CTTCGACGGG | |
| | | CTCAAATACC | |
| | 2651 | TGTTCCCCGG GGAGTGCCAG TACGTTCTGG TGCAGGATTA | |
| | | CTGCGGCAGT | |
| | 2701 | AACCCTGGGA CCTTTCGGAT CCTAGTGGGG AATAAGGGAT | |
| | | GCAGCCACCC | |
| | 2751 | CTCAGTGAAA TGCAAGAAAC GGGTCACCAT CCTGGTGGAG | |
| | | GGAGGAGAGA | |
| | 2801 | TTGAGCTGTT TGACGGGGAG GTGAATGTGA AGAGGCCCAT | |
| | | GAAGGATGAG | |
| | 2851 | ACTCACTTTG AGGTGGTGGA GTCTGGCCGG TACATCATTC | |
| | | TGCTGCTGGG | |
| | 2901 | CAAAGCCCTC TCCGTGGTCT GGGACCGCCA CCTGAGCATC | |
| | | TCCGTGGTCC | |
| | 2951 | TGAAGCAGAC ATACCAGGAG AAAGTGTGTG GCCTGTGTGG | |
| | | GAATTTTGAT | |
| | 3001 | GGCATCCAGA ACAATGACCT CACCAGCAGC AACCTCCAAG | |
| | | TGGAGGAAGA | |
| | 3051 | CCCTGTGGAC TTTGGGAACT CCTGGAAAGT GAGCTCGCAG | |
| | | TGTGCTGACA | |
| | 3101 | CCAGAAAAGT GCCTCTGGAC TCATCCCCTG CCACCTGCCA | |
| | | TAACAACATC | |
| | 3151 | ATGAAGCAGA CGATGGTGGA TTCCTCCTGT AGAATCCTTA | |
| | | CCAGTGACGT | |
| | 3201 | CTTCCAGGAC TGCAACAAGC TGGTGGACCC CGAGCCATAT | |
| | | CTGGATGTCT | |
| | 3251 | GCATTTACGA CACCTGCTCC TGTGAGTCCA TTGGGGACTG | |
| | | CGCCTGCTTC | |
| | 3301 | TGCGACACCA TTGCTGCCTA TGCCCACGTG TGTGCCCAGC | |
| | | ATGGCAAGGT | |
| | 3351 | GGTGACCTGG AGGACGGCCA CATTGTGCCC CCAGAGCTGC | |
| | | GAGGAGAGGA | |
| | 3401 | ATCTCCGGGA GAACGGGTAT GAGTGTGAGT GGCGCTATAA | |
| | | CAGCTGTGCA | |
| | 3451 | CCTGCCTGTC AAGTCACGTG TCAGCACCCT GAGCCACTGG | |
| | | CCTGCCCTGT | |
| | 3501 | GCAGTGTGTG GAGGGCTGCC ATGCCCACTG CCCTCCAGGG | |
| | | AAAATCCTGG | |
| | 3551 | ATGAGCTTTT GCAGACCTGC GTTGACCCTG AAGACTGTCC | |
| | | AGTGTGTGAG | |
| | 3601 | GTGGCTGGCC GGCGTTTTGC CTCAGGAAAG AAAGTCACCT | |
| | | TGAATCCCAG | |
| | 3651 | TGACCCTGAG CACTGCCAGA TTTGCCACTG TGATGTTGTC | |
| | | AACCTCACCT | |
| | 3701 | GTGAAGCCTG CCAGGAGCCG GGAGGCCTGG TGGTGCCTCC | |
| | | CACAGATGCC | |
| | 3751 | CCGGTGAGCC CCACCACTCT GTATGTGGAG GACATCTCGG | |
| | | AACCGCCGTT | |
| | 3801 | GCACGATTTC TACTGCAGCA GGCTACTGGA CCTGGTCTTC | |
| | | CTGCTGGATG | |
| | 3851 | GCTCCTCCAG GCTGTCCGAG GCTGAGTTTG AAGTGCTGAA | |
| | | GGCCTTTGTG | |
| | 3901 | GTGGACATGA TGGAGCGGCT GCGCATCTCC CAGAAGTGGG | |
| | | TCCGCGTGGC | |
| | 3951 | CGTGGTGGAG TACCACGACG GCTCCCACGC CTACATCGGG | |
| | | CTCAAGGACC | |
| | 4001 | GGAAGCGACC GTCAGAGCTG CGGCGCATTG CCAGCCAGGT | |
| | | GAAGTATGCG | |
| | 4051 | GGCAGCCAGG TGGCCTCCAC CAGCGAGGTC TTGAAATACA | |
| | | CACTGTTCCA | |
| | 4101 | AATCTTCAGC AAGATCGACC GCCCTGAAGC CTCCCGCATC | |
| | | GCCCTGCTCC | |
| | 4151 | TGATGGCCAG CCAGGAGCCC CAACGGATGT CCCGGAACTT | |
| | | TGTCCGCTAC | |
| | 4201 | GTCCAGGGCC TGAAGAAGAA GAAGGTCATT GTGATCCCGG | |
| | | TGGGCATTGG | |
| | 4251 | GCCCCATGCC AACCTCAAGC AGATCCGCCT CATCGAGAAG | |
| | | CAGGCCCCTG | |
| | 4301 | AGAACAAGGC CTTCGTGCTG AGCAGTGTGG ATGAGCTGGA | |
| | | GCAGCAAAGG | |
| | 4351 | GACGAGATCG TTAGCTACCT CTGTGACCTT GCCCCTGAAG | |
| | | CCCCTCCTCC | |
| | 4401 | TACTCTGCCC CCCGACATGG CACAAGTCAC TGTGGGCCCG | |
| | | GGGCTCTTGG | |
| | 4451 | GGGTTTCGAC CCTGGGGCCC AAGAGGAACT CCATGGTTCT | |
| | | GGATGTGGCG | |
| | 4501 | TTCGTCCTGG AAGGATCGGA CAAAATTGGT GAAGCCGACT | |
| | | TCAACAGGAG | |
| | 4551 | CAAGGAGTTC ATGGAGGAGG TGATTCAGCG GATGGATGTG | |
| | | GGCCAGGACA | |
| | 4601 | GCATCCACGT CACGGTGCTG CAGTACTCCT ACATGGTGAC | |
| | | CGTGGAGTAC | |
| | 4651 | CCCTTCAGCG AGGCACAGTC CAAAGGGGAC ATCCTGCAGC | |
| | | GGGTGCGAGA | |
| | 4701 | GATCCGCTAC CAGGGCGGCA ACAGGACCAA CACTGGGCTG | |
| | | GCCCTGCGGT | |
| | 4751 | ACCTCTCTGA CCACAGCTTC TTGGTCAGCC AGGGTGACCG | |
| | | GGAGCAGGCG | |
| | 4801 | CCCAACCTGG TCTACATGGT CACCGGAAAT CCTGCCTCTG | |
| | | ATGAGATCAA | |
| | 4851 | GAGGCTGCCT GGAGACATCC AGGTGGTGCC CATTGGAGTG | |
| | | GGCCCTAATG | |
| | 4901 | CCAACGTGCA GGAGCTGGAG AGGATTGGCT GGCCCAATGC | |
| | | CCCTATCCTC | |
| | 4951 | ATCCAGGACT TTGAGACGCT CCCCCGAGAG GCTCCTGACC | |
| | | TGGTGCTGCA | |
| | 5001 | GAGGTGCTGC TCCGGAGAGG GGCTGCAGAT CCCCACCCTC | |
| | | TCCCCTGCAC | |
| | 5051 | CTGACTGCAG CCAGCCCCTG GACGTGATCC TTCTCCTGGA | |
| | | TGGCTCCTCC | |
| | 5101 | AGTTTCCCAG CTTCTTATTT TGATGAAATG AAGAGTTTCG | |
| | | CCAAGGCTTT | |
| | 5151 | CATTTCAAAA GCCAATATAG GGCCTCGTCT CACTCAGGTG | |
| | | TCAGTGCTGC | |
| | 5201 | AGTATGGAAG CATCACCACC ATTGACGTGC CATGGAACGT | |
| | | GGTCCCGGAG | |
| | 5251 | AAAGCCCATT TGCTGAGCCT TGTGGACGTC ATGCAGCGGG | |
| | | AGGGAGGCCC | |
| | 5301 | CAGCCAAATC GGGGATGCCT TGGGCTTTGC TGTGCGATAC | |
| | | TTGACTTCAG | |
| | 5351 | AAATGCATGG TGCCAGGCCG GGAGCCTCAA AGGCGGTGGT | |
| | | CATCCTGGTC | |
| | 5401 | ACGGACGTCT CTGTGGATTC AGTGGATGCA GCAGCTGATG | |
| | | CCGCCAGGTC | |
| | 5451 | CAACAGAGTG ACAGTGTTCC CTATTGGAAT TGGAGATCGC | |
| | | TACGATGCAG | |
| | 5501 | CCCAGCTACG GATCTTGGCA GGCCCAGCAG GCGACTCCAA | |
| | | CGTGGTGAAG | |
| | 5551 | CTCCAGCGAA TCGAAGACCT CCCTACCATG GTCACCTTGG | |
| | | GCAATTCCTT | |
| | 5601 | CCTCCACAAA CTGTGCTCTG GATTTGTTAG GATTTGCATG | |
| | | GATGAGGATG | |
| | 5651 | GGAATGAGAA GAGGCCCGGG GACGTCTGGA CCTTGCCAGA | |
| | | CCAGTGCCAC | |
| | 5701 | ACCGTGACTT GCCAGCCAGA TGGCCAGACC TTGCTGAAGA | |
| | | GTCATCGGGT | |
| | 5751 | CAACTGTGAC CGGGGGCTGA GGCCTTCGTG CCCTAACAGC | |
| | | CAGTCCCCTG | |
| | 5801 | TTAAAGTGGA AGAGACCTGT GGCTGCCGCT GGACCTGCCC | |
| | | CTGYGTGTGC | |
| | 5851 | ACAGGCAGCT CCACTCGGCA CATCGTGACC TTTGATGGGC | |
| | | AGAATTTCAA | |
| | 5901 | GCTGACTGGC AGCTGTTCTT ATGTCCTATT TCAAAACAAG | |
| | | GAGCAGGACC | |
| | 5951 | TGGAGGTGAT TCTCCATAAT GGTGCCTGCA GCCCTGGAGC | |
| | | AAGGCAGGGC | |
| | 6001 | TGCATGAAAT CCATCGAGGT GAAGCACAGT GCCCTCTCCG | |
| | | TCGAGSTGCA | |
| | 6051 | CAGTGACATG GAGGTGACGG TGAATGGGAG ACTGGTCTCT | |
| | | GTTCCTTACG | |
| | 6101 | TGGGTGGGAA CATGGAAGTC AACGTTTATG GTGCCATCAT | |
| | | GCATGAGGTC | |
| | 6151 | AGATTCAATC ACCTTGGTCA CATCTTCACA TTCACTCCAC | |
| | | AAAACAATGA | |
| | 6201 | GTTCCAACTG CAGCTCAGCC CCAAGACTTT TGCTTCAAAG | |
| | | ACGTATGGTC | |
| | 6251 | TGTGTGGGAT CTGTGATGAG AACGGAGCCA ATGACTTCAT | |
| | | GCTGAGGGAT | |
| | 6301 | GGCACAGTCA CCACAGACTG GAAAACACTT GTTCAGGAAT | |
| | | GGACTGTGCA | |
| | 6351 | GCGGCCAGGG CAGACGTGCC AGCCCATCCT GGAGGAGCAG | |
| | | TGTCTTGTCC | |
| | 6401 | CCGACAGCTC CCACTGCCAG GTCCTCCTCT TACCACTGTT | |
| | | TGCTGAATGC | |
| | 6451 | CACAAGGTCC TGGCTCCAGC CACATTCTAT GCCATCTGCC | |
| | | AGCAGGACAG | |
| | 6501 | TTGCCACCAG GAGCAAGTGT GTGAGGTGAT CGCCTCTTAT | |
| | | GCCCACCTCT | |
| | 6551 | GTCGGACCAA CGGGGTCTGC GTTGACTGGA GGACACCTGA | |
| | | TTTCTGTGCT | |
| | 6601 | ATGTCATGCC CACCATCTCT GGTCTACAAC CACTGTGAGC | |
| | | ATGGCTGTCC | |
| | 6651 | CCGGCACTGT GATGGCAACG TGAGCTCCTG TGGGGACCAT | |
| | | CCCTCCGAAG | |
| | 6701 | GCTGTTTCTG CCCTCCAGAT AAAGTCATGT TGGAAGGCAG | |
| | | CTGTGTCCCT | |
| | 6751 | GAAGAGGCCT GCACTCAGTG CATTGGTGAG GATGGAGTCC | |
| | | AGCACCAGTT | |
| | 6801 | CCTGGAAGCC TGGGTCCCGG ACCACCAGCC CTGTCAGATC | |
| | | TGCACATGCC | |
| | 6851 | TCAGCGGGCG GAAGGTCAAC TGCACAACGC AGCCCTGCCC | |
| | | CACGGCCAAA | |
| | 6901 | GCTCCCACGT GTGGCCTGTG TGAAGTAGCC CGCCTCCGCC | |
| | | AGAATGCAGA | |
| | 6951 | CCAGTGCTGC CCCGAGTATG AGTGTGTGTG TGACCCAGTG | |
| | | AGCTGTGACC | |
| | 7001 | TGCCCCCAGT GCCTCACTGT GAACGTGGCC TCCAGCCCAC | |
| | | ACTGACCAAC | |
| | 7051 | CCTGGCGAGT GCAGACCCAA CTTCACCTGC GCCTGCAGGA | |
| | | AGGAGGAGTG | |
| | 7101 | CAAAAGAGTG TCCCCACCCT CCTGCCCCCC GCACCGTTTG | |
| | | CCCACCCTTC | |
| | 7151 | GGAAGACCCA GTGCTGTGAT GAGTATGAGT GTGCCTGCAA | |
| | | CTGTGTCAAC | |
| | 7201 | TCCACAGTGA GCTGTCCCCT TGGGTACTTG GCCTCAACCG | |
| | | CCACCAATGA | |
| | 7251 | CTGTGGCTGT ACCACAACCA CCTGCCTTCC CGACAAGGTG | |
| | | TGTGTCCACC | |
| | 7301 | GAAGCACCAT CTACCCTGTG GGCCAGTTCT GGGAGGAGGG | |
| | | CTGCGATGTG | |
| | 7351 | TGCACCTGCA CCGACATGGA GGATGCCGTG ATGGGCCTCC | |
| | | GCGTGGCCCA | |
| | 7401 | GTGCTCCCAG AAGCCCTGTG AGGACAGCTG TCGGTCGGGC | |
| | | TTCACTTACG | |
| | 7451 | TTCTGCATGA AGGCGAGTGC TGTGGAAGGT GCCTGCCATC | |
| | | TGCCTGTGAG | |
| | 7501 | GTGGTGACTG GCTCACCGCG GGGGGACTCC CAGTCTTCCT | |
| | | GGAAGAGTGT | |
| | 7551 | CGGCTCCCAG TGGGCCTCCC CGGAGAACCC CTGCCTCATC | |
| | | AATGAGTGTG | |
| | 7601 | TCCGAGTGAA GGAGGAGGTC TTTATACAAC AAAGGAACGT | |
| | | CTCCTGCCCC | |
| | 7651 | CAGCTGGAGG TCCCTGTCTG CCCCTCGGGC TTTCAGCTGA | |
| | | GCTGTAAGAC | |
| | 7701 | CTCAGCGTGC TGCCCAAGCT GTCGCTGTGA GCGCATGGAG | |
| | | GCCTGCATGC | |
| | 7751 | TCAATGGCAC TGTCATTGGG CCCGGGAAGA CTGTGATGAT | |
| | | CGATGTGTGC | |
| | 7801 | ACGACCTGCC GCTGCATGGT GCAGGTGGGG GTCATCTCTG | |
| | | GATTCAAGCT | |
| | 7851 | GGAGTGCAGG AAGACCACCT GCAACCCCTG CCCCCTGGGT | |
| | | TACAAGGAAG | |
| | 7901 | AAAATAACAC AGGTGAATGT TGTGGGAGAT GTTTGCCTAC | |
| | | GGCTTGCACC | |
| | 7951 | ATTCAGCTAA GAGGAGGACA GATCATGACA CTGAAGCGTG | |
| | | ATGAGACGCT | |
| | 8001 | CCAGGATGGC TGTGATACTC ACTTCTGCAA GGTCAATGAG | |
| | | AGAGGAGAGT | |
| | 8051 | ACTTCTGGGA GAAGAGGGTC ACAGGCTGCC CACCCTTTGA | |
| | | TGAACACAAG | |
| | 8101 | TGTCTTGCTG AGGGAGGTAA AATTATGAAA ATTCCAGGCA | |
| | | CCTGCTGTGA | |
| | 8151 | CACATGTGAG GAGCCTGAGT GCAACGACAT CACTGCCAGG | |
| | | CTGCAGTATG | |
| | 8201 | TCAAGGTGGG AAGCTGTAAG TCTGAAGTAG AGGTGGATAT | |
| | | CCACTACTGC | |
| | 8251 | CAGGGCAAAT GTGCCAGCAA AGCCATGTAC TCCATTGACA | |
| | | TCAACGATGT | |
| | 8301 | GCAGGACCAG TGCTCCTGCT GCTCTCCGAC ACGGACGGAG | |
| | | CCCATGCAGG | |
| | 8351 | TGGCCCTGCA CTGCACCAAT GGCTCTGTTG TGTACCATGA | |
| | | GGTTCTCAAT | |
| | 8401 | GCCATGGAGT GCAAATGCTC CCCCAGGAAG TGCAGCAAGT | |
| | | GA | |

[0131] The VWF protein as used herein can be a VWF fragment comprising a D′ domain and a D3 domain of VWF, wherein the VWF fragment binds to Factor VIII (FVIII) and inhibits binding of endogenous VWF (full-length VWF) to FVIII. The VWF fragment comprising the D′ domain and the D3 domain can further comprise a VWF domain selected from the group consisting of an A1 domain, an A2 domain, an A3 domain, a D1 domain, a D2 domain, a D4 domain, a B1 domain, a B2 domain, a B3 domain, a C1 domain, a C2 domain, a CK domain, one or more fragments thereof, and any combinations thereof. In one embodiment, a VWF fragment comprises, consists essentially of, or consists of: (1) the D′ and D3 domains of VWF or fragments thereof; (2) the D1, D′, and D3 domains of VWF or fragments thereof; (3) the D2, D′, and D3 domains of VWF or fragments thereof; (4) the D1, D2, D′, and D3 domains of VWF or fragments thereof; or (5) the D1, D2, D′, D3, and A1 domains of VWF or fragments thereof. The VWF fragment described herein does not contain a site binding to a VWF clearance receptor. In another embodiment, the VWF fragment described herein is not amino acids 764 to 1274 of SEQ ID NO: 21. The VWF fragment of the present invention can comprise any other sequences linked to or fused to the VWF fragment. For example, a VWF fragment described herein can further comprise a signal peptide.

[0132] In one embodiment, the VWF fragment comprising a D′ domain and a D3 domain binds to or is associated with a FVIII protein. By binding to or associating with a FVIII protein, a VWF fragment of the invention protects FVIII from protease cleavage and FVIII activation, stabilizes the heavy chain and light chain of FVIII, and prevents clearance of FVIII by scavenger receptors. In another embodiment, the VWF fragment binds to or associates with a FVIII protein and blocks or prevents binding of the FVIII protein to phospholipid and activated Protein C. By preventing or inhibiting binding of the FVIII protein with endogenous, full-length VWF, the VWF fragment of the invention reduces the clearance of FVIII by VWF clearance receptors and thus extends half-life of the chimeric protein. The half-life extension of a chimeric protein is thus due to the binding of or associating with the VWF fragment lacking a VWF clearance receptor binding site to the FVIII protein and shielding or protecting of the FVIII protein by the VWF fragment from endogenous VWF which contains the VWF clearance receptor binding site. The FVIII protein bound to or protected by the VWF fragment can also allow recycling of a FVIII protein. By eliminating the VWF clearance pathway receptor binding sites contained in the full length VWF molecule, the FVIII/VWF heterodimers of the invention are shielded from the VWF clearance pathway, further extending FVIII half-life.

[0133] In one embodiment, a VWF protein useful for the present invention comprises a D′ domain and a D3 domain of VWF, wherein the D′ domain is at least 60%, 70%, 80%, 85%, 90%, 95%, 96%, 97%, 98%, 99%, or 100% identical to amino acids 764 to 866 of SEQ ID NO: 21, wherein the VWF protein prevents or inhibits binding of endogenous VWF to FVIII. In another embodiment, a VWF protein comprises the D′ domain and the D3 domain of VWF, wherein the D3 domain is at least 60%, 70%, 80%, 85%, 90%, 95%, 96%, 97%, 98%, 99%, or 100% identical to amino acids 867 to 1240 of SEQ ID NO: 21, wherein the VWF protein prevents or inhibits binding of endogenous VWF to FVIII. In some embodiments, a VWF protein described herein comprises, consists essentially of, or consists of the D′ domain and D3 domain of VWF, which are at least 60%, 70%, 80%, 85%, 90%, 95%, 96%, 97%, 98%, 99%, or 100% identical to amino acids 764 to 1240 of SEQ ID NO: 21, wherein the VWF protein prevents or inhibits binding of endogenous VWF to FVIII. In other embodiments, a VWF protein comprises, consists essentially of, or consists of the D1, D2, D′, and D3 domains at least 60%, 70%, 80%, 85%, 90%, 95%, 96%, 97%, 98%, 99%, or 100% identical to amino acids 23 to 1240 of SEQ ID NO: 21, wherein the VWF protein prevents or inhibits binding of endogenous VWF to FVIII. In still other embodiments, the VWF protein further comprises a signal peptide operably linked thereto.

[0134] In some embodiments, a VWF protein useful for the invention consists essentially of or consists of (1) the D′D3 domain, the D1D′D3 domain, D2D′D3 domain, or D1D2D′D3 domain and (2) an additional VWF sequence up to about 10 amino acids (e.g., any sequences from amino acids 764 to 1240 of SEQ ID NO: 21 to amino acids 764 to 1250 of SEQ ID NO: 21), up to about 15 amino acids (e.g., any sequences from amino acids 764 to 1240 of SEQ ID NO: 21 to amino acids 764 to 1255 of SEQ ID NO: 21), up to about 20 amino acids (e.g., any sequences from amino acids 764 to 1240 of SEQ ID NO: 21 to amino acids 764 to 1260 of SEQ ID NO: 21), up to about 25 amino acids (e.g., any sequences from amino acids 764 to 1240 of SEQ ID NO: 21 to amino acids 764 to 1265 of SEQ ID NO: 21), or up to about 30 amino acids (e.g., any sequences from amino acids 764 to 1240 of SEQ ID NO: 21 to amino acids 764 to 1260 of SEQ ID NO: 21). In a particular embodiment, the VWF protein comprising or consisting essentially of the D′ domain and the D3 domain is neither amino acids 764 to 1274 of SEQ ID NO: 21 nor the full-length mature VWF. In some embodiments, the D1D2 domain is expressed in trans with the D′D3 domain. In some embodiments, the D1D2 domain is expressed in cis with the D′D3 domain.

[0135] In other embodiments, the VWF protein comprising the D′D3 domains linked to the D1D2 domains further comprises an intracellular cleavage site, e.g., (a cleavage site by PACE (furin) or PC5), allowing cleavage of the D1D2 domains from the D′D3 domains upon expression. Non-limiting examples of the intracellular cleavage site are disclosed elsewhere herein.

[0136] In yet other embodiments, a VWF protein comprises a D′ domain and a D3 domain, but does not comprise an amino acid sequence selected from the group consisting of (1) amino acids 1241 to 2813 corresponding to SEQ ID NO: 21, (2) amino acids 1270 to amino acids 2813 corresponding to SEQ ID NO: 21, (3) amino acids 1271 to amino acids 2813 corresponding to SEQ ID NO: 21, (4) amino acids 1272 to amino acids 2813 corresponding to SEQ ID NO: 21, (5) amino acids 1273 to amino acids 2813 corresponding to SEQ ID NO: 21, (6) amino acids 1274 to amino acids 2813 corresponding to SEQ ID NO: 21, and any combinations thereof.

[0137] In still other embodiments, a VWF protein of the present invention comprises, consists essentially of, or consists of an amino acid sequence corresponding to the D′ domain, D3 domain, and A1 domain, wherein the amino acid sequence is at least 60%, 70%, 75%, 80%, 85%, 90%, 95%, 96%, 97%, 98%, 99%, or 100% identical to amino acid 764 to 1479 of SEQ ID NO: 21, wherein the VWF protein prevents binding of endogenous VWF to FVIII. In a particular embodiment, the VWF protein is not amino acids 764 to 1274 of SEQ ID NO: 21.

[0138] In some embodiments, a VWF protein of the invention comprises a D′ domain and a D3 domain, but does not comprise at least one VWF domain selected from the group consisting of (1) an A1 domain, (2) an A2 domain, (3) an A3 domain, (4) a D4 domain, (5) a B1 domain, (6) a B2 domain, (7) a B3 domain, (8) a C1 domain, (9) a C2 domain, (10) a CK domain, (11) a CK domain and C2 domain, (12) a CK domain, a C2 domain, and a C1 domain, (13) a CK domain, a C2 domain, a C1 domain, a B3 domain, (14) a CK domain, a C2 domain, a C1 domain, a B3 domain, a B2 domain, (15) a CK domain, a C2 domain, a C1 domain, a B3 domain, a B2 domain, and a B1 domain, (16) a CK domain, a C2 domain, a C1 domain, a B3 domain, a B2 domain, a B1 domain, and a D4 domain, (17) a CK domain, a C2 domain, a C1 domain, a B3 domain, a B2 domain, a B1 domain, a D4 domain, and an A3 domain, (18) a CK domain, a C2 domain, a C1 domain, a B3 domain, a B2 domain, a B1 domain, a D4 domain, an A3 domain, and an A2 domain, (19) a CK domain, a C2 domain, a C1 domain, a B3 domain, a B2 domain, a B1 domain, a D4 domain, an A3 domain, an A2 domain, and an A1 domain, and (20) any combinations thereof.

[0139] In yet other embodiments, the VWF protein comprises the D′D3 domains and one or more domains or modules. Examples of such domains or modules include, but are not limited to, the domains and modules disclosed in Zhour et al., Blood published online Apr. 6, 2012: DOI 10.1182/blood-2012-01-405134, which is incorporated herein by reference in its entirety. For example, the VWF protein can comprise the D′D3 domain and one or more domains or modules selected from the group consisting of A1 domain, A2 domain, A3 domain, D4N module, VWD4 module, C8-4 module, TIL-4 module, C1 module, C2 module, C3 module, C4 module, C5 module, C5 module, C6 module, and any combinations thereof.

[0140] In still other embodiments, the VWF protein is linked to a heterologous moiety, wherein the heterologous moiety is linked to the N-terminus or the C-terminus of the VWF protein or inserted immediately downstream of one or more amino acids (e.g., one or more XTEN insertion sites) in the VWF protein. For example, the insertion sites for the heterologous moiety in the VWF protein can be in the D′ domain, the D3 domain, or both. The heterologous moiety can be a half-life extender.

[0141] In certain embodiments, a VWF protein useful for the invention forms a multimer, e.g., dimer, trimer, tetramer, pentamer, hexamer, heptamer, or the higher order multimers. In other embodiments, the VWF protein is a monomer having only one VWF protein. In some embodiments, the VWF protein of the present invention can have one or more amino acid substitutions, deletions, additions, or modifications. In one embodiment, the VWF protein can include amino acid substitutions, deletions, additions, or modifications such that the VWF protein is not capable of forming a disulfide bond or forming a dimer or a multimer. In another embodiment, the amino acid substitution is within the D′ domain and the D3 domain. In a particular embodiment, a VWF protein useful for the invention contains at least one amino acid substitution at a residue corresponding to residue 1099, residue 1142, or both residues 1099 and 1142 corresponding to SEQ ID NO: 21. The at least one amino acid substitution can be any amino acids that are not occurring naturally in the wild type VWF. For example, the amino acid substitution can be any amino acids other than cysteine, e.g., Isoleucine, Alanine, Leucine, Asparagine, Lysine, Aspartic acid, Methionine, Phenylalanine, Glutamic acid, Threonine, Glutamine, Tryptophan, Glycine, Valine, Proline, Serine, Tyrosine, Arginine, or Histidine. In another example, the amino acid substitution has one or more amino acids that prevent or inhibit the VWF proteins from forming multimers.

[0142] In certain embodiments, the VWF protein useful herein can be further modified to improve its interaction with FVIII, e.g., to improve binding affinity to FVIII. As a non-limiting example, the VWF protein comprises a serine residue at the residue corresponding to amino acid 764 of SEQ ID NO: 21 and a lysine residue at the residue corresponding to amino acid 773 of SEQ ID NO: 21. Residues 764 and/or 773 can contribute to the binding affinity of the VWF proteins to FVIII. In other embodiments, The VWF proteins useful for the invention can have other modifications, e.g., the protein can be pegylated, glycosylated, hesylated, or polysialylated.

### II. B. XTEN Sequences

[0143] As used herein “XTEN sequence” refers to extended length polypeptides with non-naturally occurring, substantially non-repetitive sequences that are composed mainly of small hydrophilic amino acids, with the sequence having a low degree or no secondary or tertiary structure under physiologic conditions. As a chimeric protein partner, XTENs can serve as a carrier, conferring certain desirable pharmacokinetic, physicochemical and pharmaceutical properties when linked to a VWF protein or a FVIII sequence of the invention to create a chimeric protein. Such desirable properties include but are not limited to enhanced pharmacokinetic parameters and solubility characteristics. As used herein, “XTEN” specifically excludes antibodies or antibody fragments such as single-chain antibodies or Fc fragments of a light chain or a heavy chain.

[0144] The present invention provides that a shorter XTEN sequence provides an improved half-life extending property compared to a longer XTEN sequence when the XTEN sequence is fused to a VWF protein and/or the second Ig constant region or a portion thereof. Therefore, the XTEN sequence fused to a VWF protein and/or the second Ig constant region or a portion thereof contains less than 288 amino acids in length, i.e., is shorter than 288 amino acids. In one embodiment, the XTEN sequence fused to a VWF protein and/or the second Ig constant region or a portion thereof consists of an amino acid sequence having a length of between 12 amino acids and 287 amino acids. In another embodiment, the XTEN sequence fused to a VWF protein and/or the second Ig constant region or a portion thereof comprise at least about 36 amino acids, at least about 42 amino acids, at least about 72 amino acids, or at least about 144 amino acids, but less than 288 amino acids. In other embodiments, the XTEN sequence fused to a VWF protein and/or the second Ig constant region or a portion thereof is selected from AE36, AG36, AE42, AG42, AE72, AG72, AE144, or AG144. In one embodiment, the XTEN sequence fused to a VWF protein and/or the second Ig constant region or a portion thereof is an amino acid sequence at least 80%, 85%, 90%, 95%, 96%, 97%, 98%, 99%, or 100% identical to SEQ ID NO: 9, SEQ ID NO: 10, SEQ ID NO: 11, or SEQ ID NO: 14, wherein the chimeric protein exhibits an improved half-life compared to a chimeric protein without the XTEN sequence.

[0145] The chimeric protein of the invention can further comprise an additional (second, third, or more) XTEN sequences. The additional XTEN sequence can further be fused to the FVIII protein or the first Ig constant region or a portion thereof. The additional XTEN sequences can be any length. For example, the additional XTEN sequence fused to the FVIII protein or the first Ig constant region or a portion thereof is a peptide or a polypeptide having greater than about 20, 30, 40, 50, 60, 70, 80, 90, 100, 150, 200, 250, 300, 350, 400, 450, 500, 550, 600, 650, 700, 750, 800, 850, 900, 950, 1000, 1200, 1400, 1600, 1800, or 2000 amino acid residues. In certain embodiments, the additional XTEN sequence is a peptide or a polypeptide having greater than about 20 to about 3000 amino acid residues, greater than about 30 to about 2500 residues, greater than about 40 to about 2000 residues, greater than about 50 to about 1500 residues, greater than about 60 to about 1000 residues, greater than about 70 to about 900 residues, greater than about 80 to about 800 residues, greater than about 90 to about 700 residues, greater than about 100 to about 600 residues, greater than about 110 to about 500 residues, or greater than about 120 to about 400 residues.

[0146] The XTEN sequences (i.e., the XTEN sequence fused to the VWF protein and/or the second Ig constant region or a portion thereof or the XTEN sequence fused to the FVIII protein and/or the first Ig constant region or a portion thereof or inserted at one or more insertion sites within the FVIII protein) can comprise one or more sequence motif of 9 to 14 amino acid residues or an amino acid sequence at least 80%, 90%, 91%, 92%, 93%, 94%, 95%, 96%, 97%, 98%, or 99% identical to the sequence motif, wherein the motif comprises, consists essentially of, or consists of 4 to 6 types of amino acids selected from the group consisting of glycine (G), alanine (A), serine (S), threonine (T), glutamate (E) and proline (P). See US 2010-0239554 A1.

[0147] In some embodiments, the XTEN sequence comprises non-overlapping sequence motifs in which at least about 80%, or at least about 85%, or at least about 90%, or at least about 91%, or at least about 92%, or at least about 93%, or at least about 94%, or at least about 95%, or at least about 96%, or at least about 97%, or at least about 98%, or at least about 99% or about 100% of the sequence consists of multiple units of non-overlapping sequences selected from a single motif family selected from Table 2A, resulting in a family sequence. As used herein, “family” means that the XTEN has motifs selected only from a single motif category from Table 2A; i.e., AD, AE, AF, AG, AM, AQ, BC, or BD XTEN, and that any other amino acids in the XTEN not from a family motif are selected to achieve a needed property, such as to permit incorporation of a restriction site by the encoding nucleotides, incorporation of a cleavage sequence, or to achieve a better linkage to FVIII or VWF. In some embodiments of XTEN families, an XTEN sequence comprises multiple units of non-overlapping sequence motifs of the AD motif family, or of the AE motif family, or of the AF motif family, or of the AG motif family, or of the AM motif family, or of the AQ motif family, or of the BC family, or of the BD family, with the resulting XTEN exhibiting the range of homology described above. In other embodiments, the XTEN comprises multiple units of motif sequences from two or more of the motif families of Table 2A. These sequences can be selected to achieve desired physical/chemical characteristics, including such properties as net charge, hydrophilicity, lack of secondary structure, or lack of repetitiveness that are conferred by the amino acid composition of the motifs, described more fully below. In the embodiments hereinabove described in this paragraph, the motifs incorporated into the XTEN can be selected and assembled using the methods described herein to achieve an XTEN of about 36 to about 3000 amino acid residues.

TABLE 2A
XTEN Sequence Motifs of 12 Amino Acids
and Motif Families

| Motif Family* | MOTIF SEQUENCE |
|---|---|
| AD | GESPGGSSGSES (SEQ ID NO: 24) |
| AD | GSEGSSGPGESS (SEQ ID NO: 25) |
| AD | GSSESGSSEGGP (SEQ ID NO: 26) |
| AD | GSGGEPSESGSS (SEQ ID NO: 27) |
| AE, AM | GSPAGSPTSTEE (SEQ ID NO: 28) |
| AE, AM, AQ | GSEPATSGSETP (SEQ ID NO: 29) |
| AE, AM, AQ | GTSESATPESGP (SEQ ID NO: 30) |
| AE, AM, AQ | GTSTEPSEGSAP (SEQ ID NO: 31) |
| AF, AM | GSTSESPSGTAP (SEQ ID NO: 32) |
| AF, AM | GTSTPESGSASP (SEQ ID NO: 33) |
| AF, AM | GTSPSGESSTAP (SEQ ID NO: 34) |
| AF, AM | GSTSSTAESPGP (SEQ ID NO: 35) |
| AG, AM | GTPGSGTASSSP (SEQ ID NO: 36) |
| AG, AM | GSSTPSGATGSP (SEQ ID NO: 37) |
| AG, AM | GSSPSASTGTGP (SEQ ID NO: 38) |
| AG, AM | GASPGTSSTGSP (SEQ ID NO: 39) |
| AQ | GEPAGSPTSTSE (SEQ ID NO: 40) |
| AQ | GTGEPSSTPASE (SEQ ID NO: 41) |
| AQ | GSGPSTESAPTE (SEQ ID NO: 42) |
| AQ | GSETPSGPSETA (SEQ ID NO: 43) |
| AQ | GPSETSTSEPGA (SEQ ID NO: 44) |
| AQ | GSPSEPTEGTSA (SEQ ID NO: 45) |
| BC | GSGASEPTSTEP (SEQ ID NO: 46) |
| BC | GSEPATSGTEPS (SEQ ID NO: 47) |
| BC | GTSEPSTSEPGA (SEQ ID NO: 48) |
| BC | GTSTEPSEPGSA (SEQ ID NO: 49) |
| BD | GSTAGSETSTEA (SEQ ID NO: 50) |
| BD | GSETATSGSETA (SEQ ID NO: 51) |
| BD | GTSESATSESGA (SEQ ID NO: 52) |
| BD | GTSTEASEGSAS (SEQ ID NO: 53) |

*Denotes individual motif sequences that, when used together in various permutations, results in a “family sequence”

[0148] In some embodiments, the XTEN sequence used in the invention is at least 60%, 70%, 80%, 85%, 90%, 91%, 92%, 93%, 94%, 95%, 96%, 97%, 98%, 99%, or 100% identical to a sequence selected from the group consisting of AE42, AG42, AE48, AM48, AE72, AG72, AE108, AG108, AE144, AF144, AG144, AE180, AG180, AE216, AG216, AE252, AG252, AE288, AG288, AE324, AG324, AE360, AG360, AE396, AG396, AE432, AG432, AE468, AG468, AE504, AG504, AF504, AE540, AG540, AF540, AD576, AE576, AF576, AG576, AE612, AG612, AE624, AE648, AG648, AG684, AE720, AG720, AE756, AG756, AE792, AG792, AE828, AG828, AD836, AE864, AF864, AG864, AM875, AE912, AM923, AM1318, BC864, BD864, AE948, AE1044, AE1140, AE1236, AE1332, AE1428, AE1524, AE1620, AE1716, AE1812, AE1908, AE2004A, AG948, AG1044, AG1140, AG1236, AG1332, AG1428, AG1524, AG1620, AG1716, AG1812, AG1908, and AG2004. See US 2010-0239554 A1.

[0149] In one embodiment, the XTEN sequence is at least 60%, 70%, 80%, 90%, 95%, 96%, 97%, 98%, 99% or 100% identical to an amino acid sequence selected from the group consisting of AE42 (SEQ ID NO: 9), AE72 (SEQ ID NO: 10), AE144_2A (SEQ IDNO: 55), AE144_3B (SEQ ID NO: 56), AE144_4A (SEQ ID NO: 57), AE144_5A (SEQ ID NO: 58), AE144_6B (SEQ ID NO: 59), AG144_A (SEQ ID NO: 60), AG144_B (SEQ ID NO: 61), AG144_C (SEQ ID NO: 62), AG144_F (SEQ IDNO: 63), AE864 (SEQ ID NO: 15), AE576 (SEQ ID NO: 16), AE288 (SEQ ID NO: 8), AE288_2 (SEQ ID NO: 54), AE144 (SEQ ID NO: 11), AG864 (SEQ ID NO: 17), AG576 (SEQ ID NO: 18), AG288 (SEQ ID NO: 19), AG144 (SEQ ID NO: 14), and any combinations thereof. In another embodiment, the XTEN sequence is selected from the group consisting of AE42 (SEQ ID NO: 9), AE72 (SEQ ID NO: 10), AE144_2A (SEQ IDNO: 55), AE144_3B (SEQ ID NO: 56), AE144_4A (SEQ ID NO: 57), AE144_5A (SEQ IDNO: 58), AE144_6B (SEQ ID NO: 59), AG144_A (SEQ ID NO: 60), AG144_B (SEQ ID NO: 61), AG144_C (SEQ ID NO: 62), AG144_F (SEQ IDNO: 63), AE864 (SEQ ID NO: 15), AE576 (SEQ ID NO: 16), AE288 (SEQ ID NO: 8), AE288_2 (SEQ ID NO: 54), AE144 (SEQ ID NO: 11), AG864 (SEQ ID NO: 17), AG576 (SEQ ID NO: 18), AG288 (SEQ ID NO: 19), AG144 (SEQ ID NO: 14), and any combinations thereof. In a specific embodiment, the XTEN sequence is AE288. The amino acid sequences for certain XTEN sequences of the invention are shown in Table 2B.

TABLE 2B
XTEN Sequences

| XTEN | Amino Acid Sequence |
|---|---|
| AE42 | GAPGSPAGSPTSTEEGTSESATPESGPGSEPATSGSETPASS |
| SEQ ID NO: 9 | |
| AE72 | GAP TSESATPESG PGSEPATSGS ETPGTSESAT PESGPGSEPA |
| SEQ ID NO: 10 | TSGSETPGTS ESATPESGPG TSTEPSEGSA PGASS |
| AE144 | GSEPATSGSETPGTSESATPESGPGSEPATSGSETPGSPAGSPTSTEEGTSTEPSEG |
| SEQ ID NO: 11 | SAPGSEPATSGSETPGSEPATSGSETPGSEPATSGSETPGTSTEPSEGSAPGTSESA |
| | PESGPGSEPATSGSETPGTSTEPSEGSAP |
| AE144_2A | TSTEPSEGSAPGSPAGSPTSTEEGTSTEPSEGSAPGTSTEPSEGSAPGTSESATPESGPGTS |
| (SEQ ID NO: | TEPSEGSAPGTSESATPESGPGSEPATSGSETPGTSTEPSEGSAPGTSTEPSEGSAPGTSES |
| 55) | ATPESGPGTSESATPESGPG |
| AE144_3B | SPAGSPTSTEEGTSESATPESGPGSEPATSGSETPGTSESATPESGPGTSTEPSEGSAPGTS |
| (SEQ ID NO: | TEPSEGSAPGTSTEPSEGSAPGTSTEPSEGSAPGTSTEPSEGSAPGTSTEPSEGSAPGSPAG |
| 56) | SPTSTEEGTSTEPSEGSAPG |
| AE144_4A | TSESATPESGPGSEPATSGSETPGTSESATPESGPGSEPATSGSETPGTSESATPESGPGTS |
| (SEQ ID NO: | TEPSEGSAPGTSESATPESGPGSPAGSPTSTEEGSPAGSPTSTEEGSPAGSPTSTEEGTSES |
| 57) | ATPESGPGTSTEPSEGSAPG |
| AE144_5A | TSESATPESGPGSEPATSGSETPGTSESATPESGPGSEPATSGSETPGTSESATPESGPGTS |
| (SEQ ID NO: | TEPSEGSAPGSPAGSPTSTEEGTSESATPESGPGSEPATSGSETPGTSESATPESGPGSPAG |
| 58) | SPTSTEEGSPAGSPTSTEEG |
| AE144_6B | TSTEPSEGSAPGTSESATPESGPGTSESATPESGPGTSESATPESGPGSEPATSGSETPGSE |
| (SEQ ID NO: | PATSGSETPGSPAGSPTSTEEGTSTEPSEGSAPGTSTEPSEGSAPGSEPATSGSETPGTSES |
| 59) | ATPESGPGTSTEPSEGSAPG |
| AG144 | GTPGSGTASSSPGSSTPSGATGSPGSSPSASTGTGPGSSPSASTGTGPGASPGTSST |
| SEQ ID NO: 14 | GSPGASPGTSSTGSPGSSTPSGATGSPGSSPSASTGTGPGASPGTSSTGSPGSSPSA |
| | STGTGPGTPGSGTASSSPGSSTPSGATGSP |
| AG144_A | GASPGTSSTGSPGSSPSASTGTGPGSSPSASTGTGPGTPGSGTASSSPGSSTPSGATGSPGS |
| (SEQ ID NO: | SPSASTGTGPGASPGTSSTGSPGTPGSGTASSSPGSSTPSGATGSPGTPGSGTASSSPGASP |
| 60) | GTSSTGSPGASPGTSSTGSP |
| AG144_B | GTPGSGTASSSPGSSTPSGATGSPGASPGTSSTGSPGTPGSGTASSSPGSSTPSGATGSPGS |
| (SEQ ID NO: | SPSASTGTGPGSSPSASTGTGPGSSTPSGATGSPGSSTPSGATGSPGASPGTSSTGSPGASP |
| 61) | GTSSTGSPGASPGTSSTGSP |
| AG144_C | GTPGSGTASSSPGASPGTSSTGSPGASPGTSSTGSPGASPGTSSTGSPGSSPSASTGTGPGT |
| (SEQ ID NO: | PGSGTASSSPGASPGTSSTGSPGASPGTSSTGSPGASPGTSSTGSPGSSTPSGATGSPGSST |
| 62) | PSGATGSPGASPGTSSTGSP |
| AG144_F | GSSPSASTGTGPGSSPSASTGTGPGASPGTSSTGSPGASPGTSSTGSPGSSTPSGATGSPGS |
| (SEQ ID NO: | SPSASTGTGPGASPGTSSTGSPGSSPSASTGTGPGTPGSGTASSSPGSSTPSGATGSPGSST |
| 63) | PSGATGSPGASPGTSSTGSP |
| AE288 | GTSESATPESGPGSEPATSGSETPGTSESATPESGPGSEPATSGSETPGTSESATPESG |
| SEQ ID NO: 8 | PGTSTEPSEGSAPGSPAGSPTSTEEGTSESATPESGPGSEPATSGSETPGTSESATPES |
| | GPGSPAGSPTSTEEGSPAGSPTSTEEGTSTEPSEGSAPGTSESATPESGPGTSESATPE |
| | SGPGTSESATPESGPGSEPATSGSETPGSEPATSGSETPGSPAGSPTSTEEGTSTEPSE |
| | GSAPGTSTEPSEGSAPGSEPATSGSETPGTSESATPESGPGTSTEPSEGSAP |
| AE288_2 | GSPAGSPTSTEEGTSESATPESGPGSEPATSGSETPGTSESATPESGPGTSTEPSEGSAPGT |
| (SEQ ID NO: | STEPSEGSAPGTSTEPSEGSAPGTSTEPSEGSAPGTSTEPSEGSAPGTSTEPSEGSAPGSPA |
| 54) | GSPTSTEEGTSTEPSEGSAPGTSESATPESGPGSEPATSGSETPGTSESATPESGPGSEPAT |
| | SGSETPGTSESATPESGPGTSTEPSEGSAPGTSESATPESGPGSPAGSPTSTEEGSPAGSPT |
| | STEEGSPAGSPTSTEEGTSESATPESGPGTSTEPSEGSAP |
| AG288 | PGASPGTSSTGSPGASPGTSSTGSPGTPGSGTASSSPGSSTPSGATGSPGTPGSGTASS |
| SEQ ID NO: 19 | SPGSSTPSGATGSPGTPGSGTASSSPGSSTPSGATGSPGSSTPSGATGSPGSSPSASTG |
| | TGPGSSPSASTGTGPGASPGTSSTGSPGTPGSGTASSSPGSSTPSGATGSPGSSPSAST |
| | GTGPGSSPSASTGTGPGASPGTSSTGSPGASPGTSSTGSPGSSTPSGATGSPGSSPSAS |
| | TGTGPGASPGTSSTGSPGSSPSASTGTGPGTPGSGTASSSPGSSTPSGATGS |
| AE576 | GSPAGSPTSTEEGTSESATPESGPGTSTEPSEGSAPGSPAGSPTSTEEGTSTEPSEGSA |
| SEQ ID NO: 16 | PGTSTEPSEGSAPGTSESATPESGPGSEPATSGSETPGSEPATSGSETPGSPAGSPTST |
| | EEGTSESATPESGPGTSTEPSEGSAPGTSTEPSEGSAPGSPAGSPTSTEEGTSTEPSEG |
| | SAPGTSTEPSEGSAPGTSESATPESGPGTSTEPSEGSAPGTSESATPESGPGSEPATSG |
| | SETPGTSTEPSEGSAPGTSTEPSEGSAPGTSESATPESGPGTSESATPESGPGSPAGSP |
| | TSTEEGTSESATPESGPGSEPATSGSETPGTSESATPESGPGTSTEPSEGSAPGTSTEP |
| | SEGSAPGTSTEPSEGSAPGTSTEPSEGSAPGTSTEPSEGSAPGTSTEPSEGSAPGSPAG |
| | SPTSTEEGTSTEPSEGSAPGTSESATPESGPGSEPATSGSETPGTSESATPESGPGSEP |
| | ATSGSETPGTSESATPESGPGTSTEPSEGSAPGTSESATPESGPGSPAGSPTSTEEGSP |
| | AGSPTSTEEGSPAGSPTSTEEGTSESATPESGPGTSTEPSEGSAP |
| AG576 | PGTPGSGTASSSPGSSTPSGATGSPGSSPSASTGTGPGSSPSASTGTGPGSSTPSGATG |
| SEQ ID NO: 18 | SPGSSTPSGATGSPGASPGTSSTGSPGASPGTSSTGSPGASPGTSSTGSPGTPGSGTAS |
| | SSPGASPGTSSTGSPGASPGTSSTGSPGASPGTSSTGSPGSSPSASTGTGPGTPGSGTA |
| | SSSPGASPGTSSTGSPGASPGTSSTGSPGASPGTSSTGSPGSSTPSGATGSPGSSTPSG |
| | ATGSPGASPGTSSTGSPGTPGSGTASSSPGSSTPSGATGSPGSSTPSGATGSPGSSTPS |
| | GATGSPGSSPSASTGTGPGASPGTSSTGSPGASPGTSSTGSPGTPGSGTASSSPGASPG |
| | TSSTGSPGASPGTSSTGSPGASPGTSSTGSPGASPGTSSTGSPGTPGSGTASSSPGSST |
| | PSGATGSPGTPGSGTASSSPGSSTPSGATGSPGTPGSGTASSSPGSSTPSGATGSPGSS |
| | TPSGATGSPGSSPSASTGTGPGSSPSASTGTGPGASPGTSSTGSPGTPGSGTASSSPGS |
| | STPSGATGSPGSSPSASTGTGPGSSPSASTGTGPGASPGTSSTGS |
| AE864 | GSPAGSPTSTEEGTSESATPESGPGTSTEPSEGSAPGSPAGSPTSTEEGTSTEPSEGSA |
| SEQ ID NO: 15 | PGTSTEPSEGSAPGTSESATPESGPGSEPATSGSETPGSEPATSGSETPGSPAGSPTST |
| | EEGTSESATPESGPGTSTEPSEGSAPGTSTEPSEGSAPGSPAGSPTSTEEGTSTEPSEG |
| | SAPGTSTEPSEGSAPGTSESATPESGPGTSTEPSEGSAPGTSESATPESGPGSEPATSG |
| | SETPGTSTEPSEGSAPGTSTEPSEGSAPGTSESATPESGPGTSESATPESGPGSPAGSP |
| | TSTEEGTSESATPESGPGSEPATSGSETPGTSESATPESGPGTSTEPSEGSAPGTSTEP |
| | SEGSAPGTSTEPSEGSAPGTSTEPSEGSAPGTSTEPSEGSAPGTSTEPSEGSAPGSPAG |
| | SPTSTEEGTSTEPSEGSAPGTSESATPESGPGSEPATSGSETPGTSESATPESGPGSEP |
| | ATSGSETPGTSESATPESGPGTSTEPSEGSAPGTSESATPESGPGSPAGSPTSTEEGSP |
| | AGSPTSTEEGSPAGSPTSTEEGTSESATPESGPGTSTEPSEGSAPGTSESATPESGPGS |
| | EPATSGSETPGTSESATPESGPGSEPATSGSETPGTSESATPESGPGTSTEPSEGSAPG |
| | SPAGSPTSTEEGTSESATPESGPGSEPATSGSETPGTSESATPESGPGSPAGSPTSTEE |
| | GSPAGSPTSTEEGTSTEPSEGSAPGTSESATPESGPGTSESATPESGPGTSESATPESG |
| | PGSEPATSGSETPGSEPATSGSETPGSPAGSPTSTEEGTSTEPSEGSAPGTSTEPSEGS |
| | APGSEPATSGSETPGTSESATPESGPGTSTEPSEGSAP |
| AG864 | GASPGTSSTGSPGSSPSASTGTGPGSSPSASTGTGPGTPGSGTASSSPGSSTPSGATGS |
| SEQ ID NO: 17 | PGSSPSASTGTGPGASPGTSSTGSPGTPGSGTASSSPGSSTPSGATGSPGTPGSGTASS |
| | SPGASPGTSSTGSPGASPGTSSTGSPGTPGSGTASSSPGSSTPSGATGSPGASPGTSST |
| | GSPGTPGSGTASSSPGSSTPSGATGSPGSSPSASTGTGPGSSPSASTGTGPGSSTPSGA |
| | TGSPGSSTPSGATGSPGASPGTSSTGSPGASPGTSSTGSPGASPGTSSTGSPGTPGSGT |
| | ASSSPGASPGTSSTGSPGASPGTSSTGSPGASPGTSSTGSPGSSPSASTGTGPGTPGSG |
| | TASSSPGASPGTSSTGSPGASPGTSSTGSPGASPGTSSTGSPGSSTPSGATGSPGSSTP |
| | SGATGSPGASPGTSSTGSPGTPGSGTASSSPGSSTPSGATGSPGSSTPSGATGSPGSST |
| | PSGATGSPGSSPSASTGTGPGASPGTSSTGSPGASPGTSSTGSPGTPGSGTASSSPGAS |
| | PGTSSTGSPGASPGTSSTGSPGASPGTSSTGSPGASPGTSSTGSPGTPGSGTASSSPGS |
| | STPSGATGSPGTPGSGTASSSPGSSTPSGATGSPGTPGSGTASSSPGSSTPSGATGSPG |
| | SSTPSGATGSPGSSPSASTGTGPGSSPSASTGTGPGASPGTSSTGSPGTPGSGTASSSP |
| | GSSTPSGATGSPGSSPSASTGTGPGSSPSASTGTGPGASPGTSSTGSPGASPGTSSTGS |
| | PGSSTPSGATGSPGSSPSASTGTGPGASPGTSSTGSPGSSPSASTGTGPGTPGSGTASS |
| | SPGSSTPSGATGSPGSSTPSGATGSPGASPGTSSTGSP |

[0150] In those embodiments wherein the XTEN component(s) have less than 100% of its amino acids consisting of 4, 5, or 6 types of amino acid selected from glycine (G), alanine (A), serine (S), threonine (T), glutamate (E) and proline (P), or less than 100% of the sequence consisting of the sequence motifs from Table 3 or the XTEN sequences of Tables 4, and 13-17, the other amino acid residues of the XTEN are selected from any of the other 14 natural L-amino acids, but are preferentially selected from hydrophilic amino acids such that the XTEN sequence contains at least about 90%, 91%, 92%, 93%, 94%, 95%, 96%, 97%, 98%, or at least about 99% hydrophilic amino acids. The XTEN amino acids that are not glycine (G), alanine (A), serine (S), threonine (T), glutamate (E) and proline (P) are either interspersed throughout the XTEN sequence, are located within or between the sequence motifs, or are concentrated in one or more short stretches of the XTEN sequence, e.g., to create a linker between the XTEN and the FVIII or VWF components. In such cases where the XTEN component comprises amino acids other than glycine (G), alanine (A), serine (S), threonine (T), glutamate (E) and proline (P), it is preferred that less than about 2% or less than about 1% of the amino acids be hydrophobic residues such that the resulting sequences generally lack secondary structure, e.g., not having more than 2% alpha helices or 2% beta-sheets, as determined by the methods disclosed herein. Hydrophobic residues that are less favored in construction of XTEN include tryptophan, phenylalanine, tyrosine, leucine, isoleucine, valine, and methionine. Additionally, one can design the XTEN sequences to contain less than 5% or less than 4% or less than 3% or less than 2% or less than 1% or none of the following amino acids: cysteine (to avoid disulfide formation and oxidation), methionine (to avoid oxidation), asparagine and glutamine (to avoid desamidation). Thus, in some embodiments, the XTEN component comprising other amino acids in addition to glycine (G), alanine (A), serine (S), threonine (T), glutamate (E) and proline (P) have a sequence with less than 5% of the residues contributing to alpha-helices and beta-sheets as measured by the Chou-Fasman algorithm and have at least 90%, or at least about 95% or more random coil formation as measured by the GOR algorithm.

[0151] In further embodiments, the XTEN sequence used in the invention affects the physical or chemical property, e.g., pharmacokinetics, of the chimeric protein of the present invention. The XTEN sequence used in the present invention can exhibit one or more of the following advantageous properties: conformational flexibility, enhanced aqueous solubility, high degree of protease resistance, low immunogenicity, low binding to mammalian receptors, or increased hydrodynamic (or Stokes) radii. In a specific embodiment, the XTEN sequence linked to a FVIII protein in this invention increases pharmacokinetic properties such as longer terminal half-life or increased area under the curve (AUC), so that the chimeric protein described herein stays in vivo for an increased period of time compared to wild type FVIII. In further embodiments, the XTEN sequence used in this invention increases pharmacokinetic properties such as longer terminal half-life or increased area under the curve (AUC), so that FVIII protein stays in vivo for an increased period of time compared to wild type FVIII.

[0152] One embodiment of the present invention is a FVIII/VWF fusion protein comprising a FVIII portion fused to an Fc region and a VWF portion fused to an Fc region, wherein an XTEN sequence (e.g., AE288) is inserted within the FVIII portion, and wherein an XTEN sequence having less than 288 amino acids (e.g., AE144) is inserted between the VWF portion and the Fc portion. As described in the examples, insertion of an XTEN having less than 288 amino acids between the VWF portion and the Fc portion has a greater effect on the pharmacokinetics of the chimeric protein than the insertion of an XTEN having 288 amino acids between the VWF portion and the Fc portion. For example, insertion of an XTEN sequence having less than 288 amino acids between the VWF portion and the Fc portion in FVIII/VWF fusion protein can increase the terminal half-life of the chimeric protein compared to an XTEN having 288 amino acids. In some embodiments, the terminal half-life is increased by at least about 5%, at least about 10%, at least about 15%, at least about 20%, at least about 25%, or at least about 30%, relative to the insertion of an XTEN sequence having 288 amino acids. In one particular embodiment, the terminal half-life is increased by at least about 35% relative to the insertion of an XTEN having 288 amino acids. Insertion of an XTEN sequence having less than 288 amino acids can also increase the AUC value of the chimeric protein. In some embodiments, AUC is increased by at least about 50%, at least about 100%, or at least about 200% relative to the insertion of an XTEN having 288 amino acids. In one particular embodiment, AUC is increased by about two-fold. Insertion of an XTEN sequence having less than 288 amino acids can also reduce the clearance of the chimeric protein. For example, clearance can be decreased by at least about 5%, at least about 10%, at least about 15%, at least about 20%, at least about 25%, or at least about 30%, relative to the insertion of an XTEN sequence having 288 amino acids. Insertion of an XTEN sequence having less than 288 amino acids can increase mean residence time (MRT) and/or decrease the apparent volume of distribution at steady state (Vss) relative to the insertion of an XTEN having 288 amino acids.

[0153] A variety of methods and assays can be employed to determine the physical/chemical properties of proteins comprising the XTEN sequence. Such methods include, but are not limited to analytical centrifugation, EPR, HPLC-ion exchange, HPLC-size exclusion, HPLC-reverse phase, light scattering, capillary electrophoresis, circular dichroism, differential scanning calorimetry, fluorescence, HPLC-ion exchange, HPLC-size exclusion, IR, NMR, Raman spectroscopy, refractometry, and UV/Visible spectroscopy. Additional methods are disclosed in Amau et al., Prot Expr and Purif 48, 1-13 (2006).

[0154] Additional examples of XTEN sequences that can be used according to the present invention and are disclosed in US Patent Publication Nos. 2010/0239554 A1, 2010/0323956 A1, 2011/0046060 A1, 2011/0046061 A1, 2011/0077199 A1, or 2011/0172146 A1, or International Patent Publication Nos. WO 2010091122 A1, WO 2010144502 A2, WO 2010144508 A1, WO 2011028228 A1, WO 2011028229 A1, WO 2011028344 A2, or WO 20130122617 A1.

### II.C. Factor VIII (FVIII) Protein

[0155] “A FVIII protein” as used herein means a functional FVIII polypeptide in its normal role in coagulation, unless otherwise specified. The term a FVIII protein includes a functional fragment, variant, analog, or derivative thereof that retains the function of full-length wild-type Factor VIII in the coagulation pathway. “A FVIII protein” is used interchangeably with FVIII polypeptide (or protein) or FVIII. Examples of the FVIII functions include, but not limited to, an ability to activate coagulation, an ability to act as a cofactor for factor IX, or an ability to form a tenase complex with factor IX in the presence of Ca²⁺ and phospholipids, which then converts Factor X to the activated form Xa. The FVIII protein can be the human, porcine, canine, rat, or murine FVIII protein. In addition, comparisons between FVIII from humans and other species have identified conserved residues that are likely to be required for function (Cameron et al., Thromb. Haemost. 79:317-22 (1998); U.S. Pat. No. 6,251,632).

[0156] A number of tests are available to assess the function of the coagulation system: activated partial thromboplastin time (aPTT) test, chromogenic assay, ROTEM assay, prothrombin time (PT) test (also used to determine INR), fibrinogen testing (often by the Clauss method), platelet count, platelet function testing (often by PFA-100), TCT, bleeding time, mixing test (whether an abnormality corrects if the patient's plasma is mixed with normal plasma), coagulation factor assays, antiphospholipid antibodies, D-dimer, genetic tests (e.g., factor V Leiden, prothrombin mutation G20210A), dilute Russell's viper venom time (dRVVT), miscellaneous platelet function tests, thromboelastography (TEG or Sonoclot), thromboelastometry (TEM®, e.g., ROTEM®), or euglobulin lysis time (ELT).

[0157] The aPTT test is a performance indicator measuring the efficacy of both the “intrinsic” (also referred to the contact activation pathway) and the common coagulation pathways. This test is commonly used to measure clotting activity of commercially available recombinant clotting factors, e.g., FVIII or FIX. It is used in conjunction with prothrombin time (PT), which measures the extrinsic pathway.

[0158] ROTEM analysis provides information on the whole kinetics of haemostasis: clotting time, clot formation, clot stability and lysis. The different parameters in thromboelastometry are dependent on the activity of the plasmatic coagulation system, platelet function, fibrinolysis, or many factors which influence these interactions. This assay can provide a complete view of secondary haemostasis.

[0159] The FVIII polypeptide and polynucleotide sequences are known, as are many functional fragments, mutants and modified versions. Examples of human FVIII sequences (full-length) are shown below.

TABLE 3
Amino Acid Sequence of Full-length Factor VIII

(Full-length FVIII (FVIII signal peptide underlined; FVIII heavy chain
is double underlined; B domain is italicized; and FVIII light chain
in is plain text)
Signal Peptide: (SEQ ID NO: 64)
MQIELSTCFFLCLLRFCFS
Mature Factor VIII (SEQ ID NO: 65)*
ATRRYYLGAVELSWDYMQSDLGELPVDARFPPRVPKSFPFNTSVVYKKTLFVEFTDHLFNIAKPRPPWMGLL
GPTIQAEVYDTVVITLKNMASHPVSLHAVGVSYWKASEGAEYDDQTSQREKEDDKVFPGGSHTYVWQVLKEN
GPMASDPLCLTYSYLSHVDLVKDLNSGLIGALLVCREGSLAKEKTQTLHKFILLFAVFDEGKSWHSETKNSL
MQDRDAASARAWPKMHTVNGYVNRSLPGLIGCHRKSVYWHVIGMGTTPEVHSIFLEGHTFLVRNHRQASLEI
SPITFLTAQTLLMDLGQFLLFCHISSHQHDGMEAYVKVDSCPEEPQLRMKNNEEAEDYDDDLTDSEMDVVRF
DDDNSPSFIQIRSVAKKHPKTWVHYIAAEEEDWDYAPLVLAPDDRSYKSQYLNNGPQRIGRKYKKVRFMAYT
DETFKTREAIQHESGILGPLLYGEVGDTLLIIFKNQASRPYNIYPHGITDVRPLYSRRLPKGVKHLKDFPIL
PGEIFKYKWTVTVEDGPTKSDPRCLTRYYSSFVNMERDLASGLIGPLLICYKESVDQRGNQIMSDKRNVILF
SVFDENRSWYLTENIQRFLPNPAGVQLEDPEFQASNIMHSINGYVFDSLQLSVCLHEVAYWYILSIGAQTDF
LSVFFSGYTFKHKMVYEDTLTLFPFSGETVFMSMENPGLWILGCHNSDFRNRGMTALLKVSSCDKNTGDYYE
DSYEDISAYLLSKNNAIEPRSFSQNSRHPSTRQKQFNATTIPENDIEKTDPWFAHRTPMPKIQNVSSSDLLM
LLRQSPTPHGLSLSDLQEAKYETFSDDPSPGAIDSNNSLSEMTHFRPQLHHSGDMVFTPESGLQLRLNEKLG
TTAATELKKLDFKVSSTSNNLISTIPSDNLAAGTDNTSSLGPPSMPVHYDSQLDTTLFGKKSSPLTESGGPL
SLSEENNDSKLLESGLMNSQESSWGKNVSSTESGRLFKGKRAHGPALLTKDNALFKVSISLLKTNKTSNNSA
TNRKTHIDGPSLLIENSPSVWQNILESDTEFKKVTPLIHDRMLMDKNATALRLNHMSNKTTSSKNMEMVQQK
KEGPIPPDAQNPDMSFFKMLFLPESARWIQRTHGKNSLNSGQGPSPKQLVSLGPEKSVEGQNFLSEKNKVVV
GKGEFTKDVGLKEMVFPSSRNLFLTNLDNLHENNTHNQEKKIQEEIEKKETLIQENVVLPQIHTVTGTKNFM
KNLFLLSTRQNVEGSYDGAYAPVLQDFRSLNDSTNRTKKHTAHFSKKGEEENLEGLGNQTKQIVEKYACTTR
ISPNTSQQNFVTQRSKRALKQFRLPLEETELEKRIIVDDTSTQWSKNMKHLTPSTLTQIDYNEKEKGAITQS
PLSDCLTRSHSIPQANRSPLPIAKVSSFPSIRPIYLTRVLFQDNSSHLPAASYRKKDSGVQESSHFLQGAKK
NNLSLAILTLEMTGDQREVGSLGTSATNSVTYKKVENTVLPKPDLPKTSGKVELLPKVHIYQKDLFPTETSN
GSPGHLDLVEGSLLQGTEGAIKWNEANRPGKVPFLRVATESSAKTPSKLLDPLAWDNHYGTQIPKEEWKSQE
KSPEKTAFKKKDTILSLNACESNHAIAAINEGQNKPEIEVTWAKQGRTERLCSQNPPVLKRHQREITRTTLQ
SDQEEIDYDDTISVEMKKEDFDIYDEDENQSPRSFQKKTRHYFIAAVERLWDYGMSSSPHVLRNRAQSGSVP
QFKKVVFQEFTDGSFTQPLYRGELNEHLGLLGPYIRAEVEDNIMVTFRNQASRPYSFYSSLISYEEDQRQGA
EPRKNFVKPNETKTYFWKVQHHMAPTKDEFDCKAWAYFSDVDLEKDVHSGLIGPLLVCHTNTLNPAHGRQVT
VQEFALFFTIFDETKSWYFTENMERNCRAPCNIQMEDPTFKENYRFHAINGYIMDTLPGLVMAQDQRIRWYL
LSMGSNENIHSIHFSGHVFTVRKKEEYKMALYNLYPGVFETVEMLPSKAGIWRVECLIGEHLHAGMSTLFLV
YSNKCQTPLGMASGHIRDFQITASGQYGQWAPKLARLHYSGSINAWSTKEPFSWIKVDLLAPMIIHGIKTQG
ARQKFSSLYISQFIIMYSLDGKKWQTYRGNSTGTLMVFFGNVDSSGIKHNIFNPPIIARYIRLHPTHYSIRS
TLRMELMGCDLNSCSMPLGMESKAISDAQITASSYFTNMFATWSPSKARLHLQGRSNAWRPQVNNPKEWLQV
DKQKTMKVTGVTTQGVKSLLTSMYVKEFLISSSQDGHQWTLFFQNGKVGVFQGNQDSFTPVVNSLDPPLLTR
YLRIHPQSWVHQIALRMEVLGCEAQDLY

TABLE 4
Nucleotide Sequence Encoding Full-Length FVIII (SEQ ID NO: 66)*

| | |
|---|---|
| 661 | ATG CAAATAGAGC TCTCCACCTG |
| 721 | CTTCTTTCTG TGCCTTTTGC GATTCTGCTT TAGTGCCACC AGAAGATACT ACCTGGGTGC |
| 781 | AGTGGAACTG TCATGGGACT ATATGCAAAG TGATCTCGGT GAGCTGCCTG TGGACGCAAG |
| 841 | ATTTCCTCCT AGAGTGCCAA AATCTTTTCC ATTCAACACC TCAGTCGTGT ACAAAAAGAC |
| 901 | TCTGTTTGTA GAATTCACGG ATCACCTTTT CAACATCGCT AAGCCAAGGC CACCCTGGAT |
| 961 | GGGTCTGCTA GGTCCTACCA TCCAGGCTGA GGTTTATGAT ACAGTGGTCA TTACACTTAA |
| 1021 | GAACATGGCT TCCCATCCTG TCAGTCTTCA TGCTGTTGGT GTATCCTACT GGAAAGCTTC |
| 1081 | TGAGGGAGCT GAATATGATG ATCAGACCAG TCAAAGGGAG AAAGAAGATG ATAAAGTCTT |
| 1141 | CCCTGGTGGA AGCCATACAT ATGTCTGGCA GGTCCTGAAA GAGAATGGTC CAATGGCCTC |
| 1201 | TGACCCACTG TGCCTTACCT ACTCATATCT TTCTCATGTG GACCTGGTAA AAGACTTGAA |
| 1261 | TTCAGGCCTC ATTGGAGCCC TACTAGTATG TAGAGAAGGG AGTCTGGCCA AGGAAAAGAC |
| 1321 | ACAGACCTTG CACAAATTTA TACTACTTTT TGCTGTATTT GATGAAGGGA AAAGTTGGCA |
| 1381 | CTCAGAAACA AAGAACTCCT TGATGCAGGA TAGGGATGCT GCATCTGCTC GGGCCTGGCC |
| 1441 | TAAAATGCAC ACAGTCAATG GTTATGTAAA CAGGTCTCTG CCAGGTCTGA TTGGATGCCA |
| 1501 | CAGGAAATCA GTCTATTGGC ATGTGATTGG AATGGGCACC ACTCCTGAAG TGCACTCAAT |
| 1561 | ATTCCTCGAA GGTCACACAT TTCTTGTGAG GAACCATCGC CAGGCGTCCT TGGAAATCTC |
| 1621 | GCCAATAACT TTCCTTACTG CTCAAACACT CTTGATGGAC CTTGGACAGT TTCTACTGTT |
| 1681 | TTGTCATATC TCTTCCCACC AACATGATGG CATGGAAGCT TATGTCAAAG TAGACAGCTG |
| 1741 | TCCAGAGGAA CCCCAACTAC GAATGAAAAA TAATGAAGAA GCGGAAGACT ATGATGATGA |
| 1801 | TCTTACTGAT TCTGAAATGG ATGTGGTCAG GTTTGATGAT GACAACTCTC CTTCCTTTAT |
| 1861 | CCAAATTCGC TCAGTTGCCA AGAAGCATCC TAAAACTTGG GTACATTACA TTGCTGCTGA |
| 1921 | AGAGGAGGAC TGGGACTATG CTCCCTTAGT CCTCGCCCCC GATGACAGAA GTTATAAAAG |
| 1981 | TCAATATTTG AACAATGGCC CTCAGCGGAT TGGTAGGAAG TACAAAAAAG TCCGATTTAT |
| 2041 | GGCATACACA GATGAAACCT TTAAGACTCG TGAAGCTATT CAGCATGAAT CAGGAATCTT |
| 2101 | GGGACCTTTA CTTTATGGGG AAGTTGGAGA CACACTGTTG ATTATATTTA AGAATCAAGC |
| 2161 | AAGCAGACCA TATAACATCT ACCCTCACGG AATCACTGAT GTCCGTCCTT TGTATTCAAG |
| 2221 | GAGATTACCA AAAGGTGTAA AACATTTGAA GGATTTTCCA ATTCTGCCAG GAGAAATATT |
| 2281 | CAAATATAAA TGGACAGTGA CTGTAGAAGA TGGGCCAACT AAATCAGATC CTCGGTGCCT |
| 2341 | GACCCGCTAT TACTCTAGTT TCGTTAATAT GGAGAGAGAT CTAGCTTCAG GACTCATTGG |
| 2401 | CCCTCTCCTC ATCTGCTACA AAGAATCTGT AGATCAAAGA GGAAACCAGA TAATGTCAGA |
| 2461 | CAAGAGGAAT GTCATCCTGT TTTCTGTATT TGATGAGAAC CGAAGCTGGT ACCTCACAGA |
| 2521 | GAATATACAA CGCTTTCTCC CCAATCCAGC TGGAGTGCAG CTTGAGGATC CAGAGTTCCA |
| 2581 | AGCCTCCAAC ATCATGCACA GCATCAATGG CTATGTTTTT GATAGTTTGC AGTTGTCAGT |
| 2641 | TTGTTTGCAT GAGGTGGCAT ACTGGTACAT TCTAAGCATT GGAGCACAGA CTGACTTCCT |
| 2701 | TTCTGTCTTC TTCTCTGGAT ATACCTTCAA ACACAAAATG GTCTATGAAG ACACACTCAC |
| 2761 | CCTATTCCCA TTCTCAGGAG AAACTGTCTT CATGTCGATG GAAAACCCAG GTCTATGGAT |
| 2821 | TCTGGGGTGC CACAACTCAG ACTTTCGGAA CAGAGGCATG ACCGCCTTAC TGAAGGTTTC |
| 2881 | TAGTTGTGAC AAGAACACTG GTGATTATTA CGAGGACAGT TATGAAGATA TTTCAGCATA |
| 2941 | CTTGCTGAGT AAAAACAATG CCATTGAACC AAGAAGCTTC TCCCAGAATT CAAGACACCC |
| 3001 | TAGCACTAGG CAAAAGCAAT TTAATGCCAC CACAATTCCA GAAAATGACA TAGAGAAGAC |
| 3061 | TGACCCTTGG TTTGCACACA GAACACCTAT GCCTAAAATA CAAAATGTCT CCTCTAGTGA |
| 3121 | TTTGTTGATG CTCTTGCGAC AGAGTCCTAC TCCACATGGG CTATCCTTAT CTGATCTCCA |
| 3181 | AGAAGCCAAA TATGAGACTT TTTCTGATGA TCCATCACCT GGAGCAATAG ACAGTAATAA |
| 3241 | CAGCCTGTCT GAAATGACAC ACTTCAGGCC ACAGCTCCAT CACAGTGGGG ACATGGTATT |
| 3301 | TACCCCTGAG TCAGGCCTCC AATTAAGATT AAATGAGAAA CTGGGGACAA CTGCAGCAAC |
| 3361 | AGAGTTGAAG AAACTTGATT TCAAAGTTTC TAGTACATCA AATAATCTGA TTTCAACAAT |
| 3421 | TCCATCAGAC AATTTGGCAG CAGGTACTGA TAATACAAGT TCCTTAGGAC CCCCAAGTAT |
| 3481 | GCCAGTTCAT TATGATAGTC AATTAGATAC CACTCTATTT GGCAAAAAGT CATCTCCCCT |
| 3541 | TACTGAGTCT GGTGGACCTC TGAGCTTGAG TGAAGAAAAT AATGATTCAA AGTTGTTAGA |
| 3601 | ATCAGGTTTA ATGAATAGCC AAGAAAGTTC ATGGGGAAAA AATGTATCGT CAACAGAGAG |
| 3661 | TGGTAGGTTA TTTAAAGGGA AAAGAGCTCA TGGACCTGCT TTGTTGACTA AAGATAATGC |
| 3721 | CTTATTCAAA GTTAGCATCT CTTTGTTAAA GACAAACAAA ACTTCCAATA ATTCAGCAAC |
| 3781 | TAATAGAAAG ACTCACATTG ATGGCCCATC ATTATTAATT GAGAATAGTC CATCAGTCTG |
| 3841 | GCAAAATATA TTAGAAAGTG ACACTGAGTT TAAAAAAGTG ACACCTTTGA TTCATGACAG |
| 3901 | AATGCTTATG GACAAAAATG CTACAGCTTT GAGGCTAAAT CATATGTCAA ATAAAACTAC |
| 3961 | TTCATCAAAA AACATGGAAA TGGTCCAACA GAAAAAAGAG GGCCCCATTC CACCAGATGC |
| 4021 | ACAAAATCCA GATATGTCGT TCTTTAAGAT GCTATTCTTG CCAGAATCAG CAAGGTGGAT |
| 4081 | ACAAAGGACT CATGGAAAGA ACTCTCTGAA CTCTGGGCAA GGCCCCAGTC CAAAGCAATT |
| 4141 | AGTATCCTTA GGACCAGAAA AATCTGTGGA AGGTCAGAAT TTCTTGTCTG AGAAAAACAA |
| 4201 | AGTGGTAGTA GGAAAGGGTG AATTTACAAA GGACGTAGGA CTCAAAGAGA TGGTTTTTCC |
| 4261 | AAGCAGCAGA AACCTATTTC TTACTAACTT GGATAATTTA CATGAAAATA ATACACACAA |
| 4321 | TCAAGAAAAA AAAATTCAGG AAGAAATAGA AAAGAAGGAA ACATTAATCC AAGAGAATGT |
| 4381 | AGTTTTGCCT CAGATACATA CAGTGACTGG CACTAAGAAT TTCATGAAGA ACCTTTTCTT |
| 4441 | ACTGAGCACT AGGCAAAATG TAGAAGGTTC ATATGACGGG GCATATGCTC CAGTACTTCA |
| 4501 | AGATTTTAGG TCATTAAATG ATTCAACAAA TAGAACAAAG AAACACACAG CTCATTTCTC |
| 4561 | AAAAAAAGGG GAGGAAGAAA ACTTGGAAGG CTTGGGAAAT CAAACCAAGC AAATTGTAGA |
| 4621 | GAAATATGCA TGCACCACAA GGATATCTCC TAATACAAGC CAGCAGAATT TTGTCACGCA |
| 4681 | ACGTAGTAAG AGAGCTTTGA AACAATTCAG ACTCCCACTA GAAGAAACAG AACTTGAAAA |
| 4741 | AAGGATAATT GTGGATGACA CCTCAACCCA GTGGTCCAAA AACATGAAAC ATTTGACCCC |
| 4801 | GAGCACCCTC ACACAGATAG ACTACAATGA GAAGGAGAAA GGGGCCATTA CTCAGTCTCC |
| 4861 | CTTATCAGAT TGCCTTACGA GGAGTCATAG CATCCCTCAA GCAAATAGAT CTCCATTACC |
| 4921 | CATTGCAAAG GTATCATCAT TTCCATCTAT TAGACCTATA TATCTGACCA GGGTCCTATT |
| 4981 | CCAAGACAAC TCTTCTCATC TTCCAGCAGC ATCTTATAGA AAGAAAGATT CTGGGGTCCA |
| 5041 | AGAAAGCAGT CATTTCTTAC AAGGAGCCAA AAAAAATAAC CTTTCTTTAG CCATTCTAAC |
| 5101 | CTTGGAGATG ACTGGTGATC AAAGAGAGGT TGGCTCCCTG GGGACAAGTG CCACAAATTC |
| 5161 | AGTCACATAC AAGAAAGTTG AGAACACTGT TCTCCCGAAA CCAGACTTGC CCAAAACATC |
| 5221 | TGGCAAAGTT GAATTGCTTC CAAAAGTTCA CATTTATCAG AAGGACCTAT TCCCTACGGA |
| 5281 | AACTAGCAAT GGGTCTCCTG GCCATCTGGA TCTCGTGGAA GGGAGCCTTC TTCAGGGAAC |
| 5341 | AGAGGGAGCG ATTAAGTGGA ATGAAGCAAA CAGACCTGGA AAAGTTCCCT TTCTGAGAGT |
| 5401 | AGCAACAGAA AGCTCTGCAA AGACTCCCTC CAAGCTATTG GATCCTCTTG CTTGGGATAA |
| 5461 | CCACTATGGT ACTCAGATAC CAAAAGAAGA GTGGAAATCC CAAGAGAAGT CACCAGAAAA |
| 5521 | AACAGCTTTT AAGAAAAAGG ATACCATTTT GTCCCTGAAC GCTTGTGAAA GCAATCATGC |
| 5581 | AATAGCAGCA ATAAATGAGG GACAAAATAA GCCCGAAATA GAAGTCACCT GGGCAAAGCA |
| 5641 | AGGTAGGACT GAAAGGCTGT GCTCTCAAAA CCCACCAGTC TTGAAACGCC ATCAACGGGA |
| 5701 | AATAACTCGT ACTACTCTTC AGTCAGATCA AGAGGAAATT GACTATGATG ATACCATATC |
| 5761 | AGTTGAAATG AAGAAGGAAG ATTTTGACAT TTATGATGAG GATGAAAATC AGAGCCCCCG |
| 5821 | CAGCTTTCAA AAGAAAACAC GACACTATTT TATTGCTGCA GTGGAGAGGC TCTGGGATTA |
| 5881 | TGGGATGAGT AGCTCCCCAC ATGTTCTAAG AAACAGGGCT CAGAGTGGCA GTGTCCCTCA |
| 5941 | GTTCAAGAAA GTTGTTTTCC AGGAATTTAC TGATGGCTCC TTTACTCAGC CCTTATACCG |
| 6001 | TGGAGAACTA AATGAACATT TGGGACTCCT GGGGCCATAT ATAAGAGCAG AAGTTGAAGA |
| 6061 | TAATATCATG GTAACTTTCA GAAATCAGGC CTCTCGTCCC TATTCCTTCT ATTCTAGCCT |
| 6121 | TATTTCTTAT GAGGAAGATC AGAGGCAAGG AGCAGAACCT AGAAAAAACT TTGTCAAGCC |
| 6181 | TAATGAAACC AAAACTTACT TTTGGAAAGT GCAACATCAT ATGGCACCCA CTAAAGATGA |
| 6241 | GTTTGACTGC AAAGCCTGGG CTTATTTCTC TGATGTTGAC CTGGAAAAAG ATGTGCACTC |
| 6301 | AGGCCTGATT GGACCCCTTC TGGTCTGCCA CACTAACACA CTGAACCCTG CTCATGGGAG |
| 6361 | ACAAGTGACA GTACAGGAAT TTGCTCTGTT TTTCACCATC TTTGATGAGA CCAAAAGCTG |
| 6421 | GTACTTCACT GAAAATATGG AAAGAAACTG CAGGGCTCCC TGCAATATCC AGATGGAAGA |
| 6481 | TCCCACTTTT AAAGAGAATT ATCGCTTCCA TGCAATCAAT GGCTACATAA TGGATACACT |
| 6541 | ACCTGGCTTA GTAATGGCTC AGGATCAAAG GATTCGATGG TATCTGCTCA GCATGGGCAG |
| 6601 | CAATGAAAAC ATCCATTCTA TTCATTTCAG TGGACATGTG TTCACTGTAC GAAAAAAAGA |
| 6661 | GGAGTATAAA ATGGCACTGT ACAATCTCTA TCCAGGTGTT TTTGAGACAG TGGAAATGTT |
| 6721 | ACCATCCAAA GCTGGAATTT GGCGGGTGGA ATGCCTTATT GGCGAGCATC TACATGCTGG |
| 6781 | GATGAGCACA CTTTTTCTGG TGTACAGCAA TAAGTGTCAG ACTCCCCTGG GAATGGCTTC |
| 6841 | TGGACACATT AGAGATTTTC AGATTACAGC TTCAGGACAA TATGGACAGT GGGCCCCAAA |
| 6901 | GCTGGCCAGA CTTCATTATT CCGGATCAAT CAATGCCTGG AGCACCAAGG AGCCCTTTTC |
| 6961 | TTGGATCAAG GTGGATCTGT TGGCACCAAT GATTATTCAC GGCATCAAGA CCCAGGGTGC |
| 7021 | CCGTCAGAAG TTCTCCAGCC TCTACATCTC TCAGTTTATC ATCATGTATA GTCTTGATGG |
| 7081 | GAAGAAGTGG CAGACTTATC GAGGAAATTC CACTGGAACC TTAATGGTCT TCTTTGGCAA |
| 7141 | TGTGGATTCA TCTGGGATAA AACACAATAT TTTTAACCCT CCAATTATTG CTCGATACAT |
| 7201 | CCGTTTGCAC CCAACTCATT ATAGCATTCG CAGCACTCTT CGCATGGAGT TGATGGGCTG |
| 7261 | TGATTTAAAT AGTTGCAGCA TGCCATTGGG AATGGAGAGT AAAGCAATAT CAGATGCACA |
| 7321 | GATTACTGCT TCATCCTACT TTACCAATAT GTTTGCCACC TGGTCTCCTT CAAAAGCTCG |
| 7381 | ACTTCACCTC CAAGGGAGGA GTAATGCCTG GAGACCTCAG GTGAATAATC CAAAAGAGTG |
| 7441 | GCTGCAAGTG GACTTCCAGA AGACAATGAA AGTCACAGGA GTAACTACTC AGGGAGTAAA |
| 7501 | ATCTCTGCTT ACCAGCATGT ATGTGAAGGA GTTCCTCATC TCCAGCAGTC AAGATGGCCA |
| 7561 | TCAGTGGACT CTCTTTTTTC AGAATGGCAA AGTAAAGGTT TTTCAGGGAA ATCAAGACTC |
| 7621 | CTTCACACCT GTGGTGAACT CTCTAGACCC ACCGTTACTG ACTCGCTACC TTCGAATTCA |
| 7681 | CCCCCAGAGT TGGGTGCACC AGATTGCCCT GAGGATGGAG GTTCTGGGCT GCGAGGCACA |
| 7741 | GGACCTCTAC |

*The underlined nucleic acids encode a signal peptide.

[0160] FVIII polypeptides include full-length FVIII, full-length FVIII minus Met at the N-terminus, mature FVIII (minus the signal sequence), mature FVIII with an additional Met at the N-terminus, and/or FVIII with a full or partial deletion of the B domain. In certain embodiments, FVIII variants include B domain deletions, whether partial or full deletions.

[0161] The sequence of native mature human FVIII is presented as SEQ ID NO: 65. A native FVIII protein has the following formula: A1-a1-A2-a2-B-a3-A3-C1-C2, where A1, A2, and A3 are the structurally-related “A domains,” B is the “B domain,” C1 and C2 are the structurally-related “C domains,” and a1, a2 and a3 are acidic spacer regions. Referring to the primary amino acid sequence position in SEQ ID NO:65, the A1 domain of human FVIII extends from Ala1 to about Arg336, the a1 spacer region extends from about Met337 to about Val374, the A2 domain extends from about Ala375 to about Tyr719, the a2 spacer region extends from about Glu720 to about Arg740, the B domain extends from about Ser741 to about Arg 1648, the a3 spacer region extends from about Glu1649 to about Arg1689, the A3 domain extends from about Ser1690 to about Leu2025, the C1 domain extends from about Gly2026 to about Asn2072, and the C2 domain extends from about Ser2073 to Tyr2332. Other than specific proteolytic cleavage sites, designation of the locations of the boundaries between the domains and regions of FVIII can vary in different literature references. The boundaries noted herein are therefore designated as approximate by use of the term “about.”

[0162] The human FVIII gene was isolated and expressed in mammalian cells (Toole, J. J., et al., Nature 312:342-347 (1984); Gitschier, J., et al., Nature 312:326-330 (1984); Wood, W. I., et al., Nature 312:330-337 (1984); Vehar, G. A., et al., Nature 312:337-342 (1984); WO 87/04187; WO 88/08035; WO 88/03558; and U.S. Pat. No. 4,757,006). The FVIII amino acid sequence was deduced from cDNA as shown in U.S. Pat. No. 4,965,199. In addition, partially or fully B-domain deleted FVIII is shown in U.S. Pat. Nos. 4,994,371 and 4,868,112. In some embodiments, the human FVIII B-domain is replaced with the human Factor V B-domain as shown in U.S. Pat. No. 5,004,803. The cDNA sequence encoding human Factor VIII and amino acid sequence are shown in SEQ ID NOs: 1 and 2, respectively, of US Application Publ. No. 2005/0100990.

[0163] The porcine FVIII sequence is published in Toole, J. J., et al., Proc. Natl. Acad. Sci. USA 83:5939-5942 (1986). Further, the complete porcine cDNA sequence obtained from PCR amplification of FVIII sequences from a pig spleen cDNA library has been reported in Healey, J. F., et al., Blood 88:4209-4214 (1996). Hybrid human/porcine FVIII having substitutions of all domains, all subunits, and specific amino acid sequences were disclosed in U.S. Pat. No. 5,364,771 by Lollar and Runge, and in WO 93/20093. More recently, the nucleotide and corresponding amino acid sequences of the A1 and A2 domains of porcine FVIII and a chimeric FVIII with porcine A1 and/or A2 domains substituted for the corresponding human domains were reported in WO 94/11503. U.S. Pat. No. 5,859,204, Lollar, J. S., also discloses the porcine cDNA and deduced amino acid sequences. U.S. Pat. No. 6,458,563 discloses a B-domain-deleted porcine FVIII.

[0164] U.S. Pat. No. 5,859,204 to Lollar, J. S. reports functional mutants of FVIII having reduced antigenicity and reduced immunoreactivity. U.S. Pat. No. 6,376,463 to Lollar, J. S. also reports mutants of FVIII having reduced immunoreactivity. US Appl. Publ. No. 2005/0100990 to Saenko et al. reports functional mutations in the A2 domain of FVIII.

[0165] In one embodiment, the FVIII (or FVIII portion of a chimeric protein) may be at least 50%, 60%, 70%, 80%, 90%, 95%, 96%, 97%, 98%, 99%, or 100% identical to a FVIII amino acid sequence of amino acids 1 to 1438 of SEQ ID NO: 67 or amino acids 1 to 2332 of SEQ ID NO: 65 (without a signal sequence) or a FVIII amino acid sequence of amino acids 1 to 19 of SEQ ID NO: 64 and 1 to 1438 of SEQ ID NO: 67 or amino acids 1 to 19 of SEQ ID NO: 64 and amino acids 1 to 2332 of SEQ ID NO: 65 (with a signal sequence), wherein the FVIII has a clotting activity, e.g., activates Factor IX as a cofactor to convert Factor X to activated Factor X. The FVIII (or FVIII portion of a chimeric protein) may be identical to a FVIII amino acid sequence of amino acids 1 to 1438 of SEQ ID NO: 67 or amino acids 1 to 2332 of SEQ ID NO: 65 (without a signal sequence). The FVIII may further comprise a signal sequence.

[0166] The “B-domain” of FVIII, as used herein, is the same as the B-domain known in the art that is defined by internal amino acid sequence identity and sites of proteolytic cleavage, e.g., residues Ser741-Arg1648 of full-length human FVIII. The other human FVIII domains are defined by the following amino acid residues: A1, residues Ala1-Arg372; A2, residues Ser373-Arg740; A3, residues Ser1690-Asn2019; C1, residues Lys2020-Asn2172; C2, residues Ser2173-Tyr2332. The A3-C1-C2 sequence includes residues Ser1690-Tyr2332. The remaining sequence, residues Glu1649-Arg1689, is usually referred to as the a3 acidic region. The locations of the boundaries for all of the domains, including the B-domains, for porcine, mouse and canine FVIII are also known in the art. In one embodiment, the B domain of FVIII is deleted (“B-domain-deleted factor VIII” or “BDD FVIII”). An example of a BDD FVIII is REFACTO® (recombinant BDD FVIII), which has the same sequence as the Factor VIII portion of the sequence in Table 5. (BDD FVIII heavy chain is double underlined; B domain is italicized; and BDD FVIII light chain is in plain text). A nucleotide sequence encoding Table 6 (SEQ ID NO: 68) is shown in Table 6.

TABLE 5
Amino Acid Sequence of B-domain
Deleted Factor VIII (BBD FVIII)

BDD FVIII (SEQ ID NO: 67)
ATRRYYLGAVELSWDYMQSDLGELPVDARFPPRVPKSFPFNTSVVYKKTLFVEFTDHLFNIAKPRPPWMGLL
GPTIQAEVYDTVVITLKNMASHPVSLHAVGVSYWKASEGAEYDDQTSQREKEDDKVFPGGSHTYVWQVLKEN
GPMASDPLCLTYSYLSHVDLVKDLNSGLIGALLVCREGSLAKEKTQTLHKFILLFAVFDEGKSWHSETKNSL
MQDRDAASARAWPKMHTVNGYVNRSLPGLIGCHRKSVYWHVIGMGTTPEVHSIFLEGHTFLVRNHRQASLEI
SPITFLTAQTLLMDLGQFLLFCHISSHQHDGMEAYVKVDSCPEEPQLRMKNNEEAEDYDDDLTDSEMDVVRF
DDDNSPSFIQIRSVAKKHPKTWVHYIAAEEEDWDYAPLVLAPDDRSYKSQYLNNGPQRIGRKYKKVRFMAYT
DETFKTREAIQHESGILGPLLYGEVGDTLLIIFKNQASRPYNIYPHGITDVRPLYSRRLPKGVKHLKDFPIL
PGEIFKYKWTVTVEDGPTKSDPRCLTRYYSSFVNMERDLASGLIGPLLICYKESVDQRGNQIMSDKRNVILF
WVFDENRSWYLTENIQRFLPNPAGVQLEDPEFQASNIMHSINGYVFDSLQLSVCLHEVAYWYILSIGAQTDF
LSVFFSGYTFKHKMVYEDTLTLFPFSGETVFMSMENPGLWILGCHNSDFRNRGMTALLKVSSCDKNTGDYYE
DSYEDISAYLLSKNNAIEPRSFSQNPPVLKRHQREITRTTLQSDQEEIDYDDTISVEMKKEDFDIYDEDENQ
SPRSFQKKTRHYFIAAVERLWDYGMSSSPHVLRNRAQSGSVPQFKKVVFQEFTDGSFTQPLYRGELNEHLGL
LGPYIRAEVEDNIMVTFRNQASRPYSFYSSLISYEEDQRQGAEPRKNFVKPNETKTYFWKVQHHMAPTKDEF
DCKAWAYFSDVDLEKDVHSGLIGPLLVCHTNTLNPAHGRQVTVQEFALFFTIFDETKSWYFTENMERNCRAP
CNIQMEDPTFKENYRFHAINGYIMDTLPGLVMAQDQRIRWYLLSMGSNENIHSIHFSGHVFTVRKKEEYKMA
LYNLYPGVFETVEMLPSKAGIWRVECLIGEHLHAGMSTLFLVYSKNCQTPLGMASGHIRDFQITASGQYGQW
APKLARLHYSGSINAWSTKEPFSWIKVDLLAPMIIHGIKTQGARQKFSSLYISQFIIMYSLDGKKWQTYRGN
STGTLMVFFGNVDSSGIKHNIFNPPIIARYIRLHPTHYSIRSTLRMELMGCDLNSCSMPLGMESKAISDAQI
TASSYFTNMFATWSPSKARLHLQGRSNAWRPQVNNPKEWLQVDFQKTMKVTGVTTQGVKSLLTSMYVKEFLI
SSSQDGHQWTLFFQNGKVKVFQGNQDSFTPVVNSLDPPLLTRYLRIHPQSWVHQIALRMEVLGCEAQDLY

TABLE 6
Nucleotide Sequence Encoding BDD FVIII (SEQ ID NO: 68)*

| | |
|---|---|
| 661 | A TGCAAATAGA GCTCTCCACC TGCTTCTTTC |
| 721 | TGTGCCTTTT GCGATTCTGC TTTAGTGCCA CCAGAAGATA CTACCTGGGT GCAGTGGAAC |
| 781 | TGTCATGGGA CTATATGCAA AGTGATCTCG GTGAGCTGCC TGTGGACGCA AGATTTCCTC |
| 841 | CTAGAGTGCC AAAATCTTTT CCATTCAACA CCTCAGTCGT GTACAAAAAG ACTCTGTTTG |
| 901 | TAGAATTCAC GGATCACCTT TTCAACATCG CTAAGCCAAG GCCACCCTGG ATGGGTCTGC |
| 961 | TAGGTCCTAC CATCCAGGCT GAGGTTTATG ATACAGTGGT CATTACACTT AAGAACATGG |
| 1021 | CTTCCCATCC TGTCAGTCTT CATGCTGTTG GTGTATCCTA CTGGAAAGCT TCTGAGGGAG |
| 1081 | CTGAATATGA TGATCAGACC AGTCAAAGGG AGAAAGAAGA TGATAAAGTC TTCCCTGGTG |
| 1141 | GAAGCCATAC ATATGTCTGG CAGGTCCTGA AAGAGAATGG TCCAATGGCC TCTGACCCAC |
| 1201 | TGTGCCTTAC CTACTCATAT CTTTCTCATG TGGACCTGGT AAAAGACTTG AATTCAGGCC |
| 1261 | TCATTGGAGC CCTACTAGTA TGTAGAGAAG GGAGTCTGGC CAAGGAAAAG ACACAGACCT |
| 1321 | TGCACAAATT TATACTACTT TTTGCTGTAT TTGATGAAGG GAAAAGTTGG CACTCAGAAA |
| 1381 | CAAAGAACTC CTTGATGCAG GATAGGGATG CTGCATCTGC TCGGGCCTGG CCTAAAATGC |
| 1441 | ACACAGTCAA TGGTTATGTA AACAGGTCTC TGCCAGGTCT GATTGGATGC CACAGGAAAT |
| 1501 | CAGTCTATTG GCATGTGATT GGAATGGGCA CCACTCCTGA AGTGCACTCA ATATTCCTCG |
| 1561 | AAGGTCACAC ATTTCTTGTG AGGAACCATC GCCAGGCGTC CTTGGAAATC TCGCCAATAA |
| 1621 | CTTTCCTTAC TGCTCAAACA CTCTTGATGG ACCTTGGACA GTTTCTACTG TTTTGTCATA |
| 1681 | TCTCTTCCCA CCAACATGAT GGCATGGAAG CTTATGTCAA AGTAGACAGC TGTCCAGAGG |
| 1741 | AACCCCAACT ACGAATGAAA AATAATGAAG AAGCGGAAGA CTATGATGAT GATCTTACTG |
| 1801 | ATTCTGAAAT GGATGTGGTC AGGTTTGATG ATGACAACTC TCCTTCCTTT ATCCAAATTC |
| 1861 | GCTCAGTTGC CAAGAAGCAT CCTAAAACTT GGGTACATTA CATTGCTGCT GAAGAGGAGG |
| 1921 | ACTGGGACTA TGCTCCCTTA GTCCTCGCCC CCGATGACAG AAGTTATAAA AGTCAATATT |
| 1981 | TGAACAATGG CCCTCAGCGG ATTGGTAGGA AGTACAAAAA AGTCCGATTT ATGGCATACA |
| 2041 | CAGATGAAAC CTTTAAGACT CGTGAAGCTA TTCAGCATGA ATCAGGAATC TTGGGACCTT |
| 2101 | TACTTTATGG GGAAGTTGGA GACACACTGT TGATTATATT TAAGAATCAA GCAAGCAGAC |
| 2161 | CATATAACAT CTACCCTCAC GGAATCACTG ATGTCCGTCC TTTGTATTCA AGGAGATTAC |
| 2221 | CAAAAGGTGT AAAACATTTG AAGGATTTTC CAATTCTGCC AGGAGAAATA TTCAAATATA |
| 2281 | AATGGACAGT GACTGTAGAA GATGGGCCAA CTAAATCAGA TCCTCGGTGC CTGACCCGCT |
| 2341 | ATTACTCTAG TTTCGTTAAT ATGGAGAGAG ATCTAGCTTC AGGACTCATT GGCCCTCTCC |
| 2401 | TCATCTGCTA CAAAGAATCT GTAGATCAAA GAGGAAACCA GATAATGTCA GACAAGAGGA |
| 2461 | ATGTCATCCT GTTTTCTGTA TTTGATGAGA ACCGAAGCTG GTACCTCACA GAGAATATAC |
| 2521 | AACGCTTTCT CCCCAATCCA GCTGGAGTGC AGCTTGAGGA TCCAGAGTTC CAAGCCTCCA |
| 2581 | ACATCATGCA CAGCATCAAT GGCTATGTTT TTGATAGTTT GCAGTTGTCA GTTTGTTTGC |
| 2641 | ATGAGGTGGC ATACTGGTAC ATTCTAAGCA TTGGAGCACA GACTGACTTC CTTTCTGTCT |
| 2701 | TCTTCTCTGG ATATACCTTC AAACACAAAA TGGTCTATGA AGACACACTC ACCCTATTCC |
| 2761 | CATTCTCAGG AGAAACTGTC TTCATGTCGA TGGAAAACCC AGGTCTATGG ATTCTGGGGT |
| 2821 | GCCACAACTC AGACTTTCGG AACAGAGGCA TGACCGCCTT ACTGAAGGTT TCTAGTTGTG |
| 2881 | ACAAGAACAC TGGTGATTAT TACGAGGACA GTTATGAAGA TATTTCAGCA TACTTGCTGA |
| 2941 | GTAAAAACAA TGCCATTGAA CCAAGAAGCT TCTCTCAAAA CCCACCAGTC TTGAAACGCC |
| 3001 | ATCAACGGGA AATAACTCGT ACTACTCTTC AGTCAGATCA AGAGGAAATT GACTATGATG |
| 3061 | ATACCATATC AGTTGAAATG AAGAAGGAAG ATTTTGACAT TTATGATGAG GATGAAAATC |
| 3121 | AGAGCCCCCG CAGCTTTCAA AAGAAAACAC GACACTATTT TATTGCTGCA GTGGAGAGGC |
| 3181 | TCTGGGATTA TGGGATGAGT AGCTCCCCAC ATGTTCTAAG AAACAGGGCT CAGAGTGGCA |
| 3241 | GTGTCCCTCA GTTCAAGAAA GTTGTTTTCC AGGAATTTAC TGATGGCTCC TTTACTCAGC |
| 3301 | CCTTATACCG TGGAGAACTA AATGAACATT TGGGACTCCT GGGGCCATAT ATAAGAGCAG |
| 3361 | AAGTTGAAGA TAATATCATG GTAACTTTCA GAAATCAGGC CTCTCGTCCC TATTCCTTCT |
| 3421 | ATTCTAGCCT TATTTCTTAT GAGGAAGATC AGAGGCAAGG AGCAGAACCT AGAAAAAACT |
| 3481 | TTGTCAAGCC TAATGAAACC AAAACTTACT TTTGGAAAGT GCAACATCAT ATGGCACCCA |
| 3541 | CTAAAGATGA GTTTGACTGC AAAGCCTGGG CTTATTTCTC TGATGTTGAC CTGGAAAAAG |
| 3601 | ATGTGCACTC AGGCCTGATT GGACCCCTTC TGGTCTGCCA CACTAACACA CTGAACCCTG |
| 3661 | CTCATGGGAG ACAAGTGACA GTACAGGAAT TTGCTCTGTT TTTCACCATC TTTGATGAGA |
| 3721 | CCAAAAGCTG GTACTTCACT GAAAATATGG AAAGAAACTG CAGGGCTCCC TGCAATATCC |
| 3781 | AGATGGAAGA TCCCACTTTT AAAGAGAATT ATCGCTTCCA TGCAATCAAT GGCTACATAA |
| 3841 | TGGATACACT ACCTGGCTTA GTAATGGCTC AGGATCAAAG GATTCGATGG TATCTGCTCA |
| 3901 | GCATGGGCAG CAATGAAAAC ATCCATTCTA TTCATTTCAG TGGACATGTG TTCACTGTAC |
| 3961 | GAAAAAAAGA GGAGTATAAA ATGGCACTGT ACAATCTCTA TCCAGGTGTT TTTGAGACAG |
| 4021 | TGGAAATGTT ACCATCCAAA GCTGGAATTT GGCGGGTGGA ATGCCTTATT GGCGAGCATC |
| 4081 | TACATGCTGG GATGAGCACA CTTTTTCTGG TGTACAGCAA TAAGTGTCAG ACTCCCCTGG |
| 4141 | GAATGGCTTC TGGACACATT AGAGATTTTC AGATTACAGC TTCAGGACAA TATGGACAGT |
| 4201 | GGGCCCCAAA GCTGGCCAGA CTTCATTATT CCGGATCAAT CAATGCCTGG AGCACCAAGG |
| 4261 | AGCCCTTTTC TTGGATCAAG GTGGATCTGT TGGCACCAAT GATTATTCAC GGCATCAAGA |
| 4321 | CCCAGGGTGC CCGTCAGAAG TTCTCCAGCC TCTACATCTC TCAGTTTATC ATCATGTATA |
| 4381 | GTCTTGATGG GAAGAAGTGG CAGACTTATC GAGGAAATTC CACTGGAACC TTAATGGTCT |
| 4441 | TCTTTGGCAA TGTGGATTCA TCTGGGATAA AACACAATAT TTTTAACCCT CCAATTATTG |
| 4501 | CTCGATACAT CCGTTTGCAC CCAACTCATT ATAGCATTCG CAGCACTCTT CGCATGGAGT |
| 4561 | TGATGGGCTG TGATTTAAAT AGTTGCAGCA TGCCATTGGG AATGGAGAGT AAAGCAATAT |
| 4621 | CAGATGCACA GATTACTGCT TCATCCTACT TTACCAATAT GTTTGCCACC TGGTCTCCTT |
| 4681 | CAAAAGCTCG ACTTCACCTC CAAGGGAGGA GTAATGCCTG GAGACCTCAG GTGAATAATC |
| 4741 | CAAAAGAGTG GCTGCAAGTG GACTTCCAGA AGACAATGAA AGTCACAGGA GTAACTACTC |
| 4801 | AGGGAGTAAA ATCTCTGCTT ACCAGCATGT ATGTGAAGGA GTTCCTCATC TCCAGCAGTC |
| 4861 | AAGATGGCCA TCAGTGGACT CTCTTTTTTC AGAATGGCAA AGTAAAGGTT TTTCAGGGAA |
| 4921 | ATCAAGACTC CTTCACACCT GTGGTGAACT CTCTAGACCC ACCGTTACTG ACTCGCTACC |
| 4981 | TTCGAATTCA CCCCCAGAGT TGGGTGCACC AGATTGCCCT GAGGATGGAG GTTCTGGGCT |
| 5041 | GCGAGGCACA GGACCTCTAC |

*The underlined nucleic acids encode a signal peptide.

[0167] A “B-domain-deleted FVIII” may have the full or partial deletions disclosed in U.S. Pat. Nos. 6,316,226, 6,346,513, 7,041,635, 5,789,203, 6,060,447, 5,595,886, 6,228,620, 5,972,885, 6,048,720, 5,543,502, 5,610,278, 5,171,844, 5,112,950, 4,868,112, and 6,458,563. In some embodiments, a B-domain-deleted FVIII sequence of the present invention comprises any one of the deletions disclosed at col. 4, line 4 to col. 5, line 28 and Examples 1-5 of U.S. Pat. No. 6,316,226 (also in U.S. Pat. No. 6,346,513). In another embodiment, a B-domain deleted Factor VIII is the S743/Q1638 B-domain deleted Factor VIII (SQ BDD FVIII) (e.g., Factor VIII having a deletion from amino acid 744 to amino acid 1637, e.g., Factor VIII having amino acids 1-743 and amino acids 1638-2332 of SEQ ID NO: 65, i.e., SEQ ID NO: 67). In some embodiments, a B-domain-deleted FVIII of the present invention has a deletion disclosed at col. 2, lines 26-51 and examples 5-8 of U.S. Pat. No. 5,789,203 (also U.S. Pat. No. 6,060,447, U.S. Pat. No. 5,595,886, and U.S. Pat. No. 6,228,620). In some embodiments, a B-domain-deleted Factor VIII has a deletion described in col. 1, lines 25 to col. 2, line 40 of U.S. Pat. No. 5,972,885; col. 6, lines 1-22 and example 1 of U.S. Pat. No. 6,048,720; col. 2, lines 17-46 of U.S. Pat. No. 5,543,502; col. 4, line 22 to col. 5, line 36 of U.S. Pat. No. 5,171,844; col. 2, lines 55-68, FIG. 2, and example 1 of U.S. Pat. No. 5,112,950; col. 2, line 2 to col. 19, line 21 and table 2 of U.S. Pat. No. 4,868,112; col. 2, line 1 to col. 3, line 19, col. 3, line 40 to col. 4, line 67, col. 7, line 43 to col. 8, line 26, and col. 11, line 5 to col. 13, line 39 of U.S. Pat. No. 7,041,635; or col. 4, lines 25-53, of U.S. Pat. No. 6,458,563. In some embodiments, a B-domain-deleted FVIII has a deletion of most of the B domain, but still contains amino-terminal sequences of the B domain that are essential for in vivo proteolytic processing of the primary translation product into two polypeptide chain, as disclosed in WO 91/09122. In some embodiments, a B-domain-deleted FVIII is constructed with a deletion of amino acids 747-1638, i.e., virtually a complete deletion of the B domain. Hoeben R. C., et al. J. Biol. Chem. 265 (13): 7318-7323 (1990). A B-domain-deleted Factor VIII may also contain a deletion of amino acids 771-1666 or amino acids 868-1562 of FVIII. Meulien P., et al. Protein Eng. 2(4): 301-6 (1988). Additional B domain deletions that are part of the invention include: deletion of amino acids 982 through 1562 or 760 through 1639 (Toole et al., Proc. Natl. Acad. Sci. U.S.A. (1986) 83, 5939-5942)), 797 through 1562 (Eaton, et al. Biochemistry (1986) 25:8343-8347)), 741 through 1646 (Kaufman (PCT published application No. WO 87/04187)), 747-1560 (Sarver, et al., DNA (1987) 6:553-564)), 741 through 1648 (Pasek (PCT application No. 88/00831)), or 816 through 1598 or 741 through 1648 (Lagner (Behring Inst. Mitt. (1988) No 82:16-25, EP 295597)). In other embodiments, BDD FVIII includes a FVIII polypeptide containing fragments of the B-domain that retain one or more N-linked glycosylation sites, e.g., residues 757, 784, 828, 900, 963, or optionally 943, which correspond to the amino acid sequence of the full-length FVIII sequence. Examples of the B-domain fragments include 226 amino acids or 163 amino acids of the B-domain as disclosed in Miao, H. Z., et al., Blood 103(a): 3412-3419 (2004), Kasuda, A, et al., J. Thromb. Haemost. 6: 1352-1359 (2008), and Pipe, S. W., et al., J. Thromb. Haemost. 9: 2235-2242 (2011) (i.e., the first 226 amino acids or 163 amino acids of the B domain are retained). In still other embodiments, BDD FVIII further comprises a point mutation at residue 309 (from Phe to Ser) to improve expression of the BDD FVIII protein. See Miao, H. Z., et al., Blood 103(a): 3412-3419 (2004). In still other embodiments, the BDD FVIII includes a FVIII polypeptide containing a portion of the B-domain, but not containing one or more furin cleavage sites (e.g., Arg1313 and Arg 1648). See Pipe, S. W., et al., J. Thromb. Haemost. 9: 2235-2242 (2011). Each of the foregoing deletions may be made in any FVIII sequence.

[0168] In some embodiments, the FVIII has a partial B-domain. In some embodiments, the FVIII protein with a partial B-domain is FVIII198. FVIII198 is a partial B-domain containing single chain FVIIIFc molecule-226N6. Number 226 represents the N-terminus 226 amino acid of the FVIII B-domain, and N6 represents six N-glycosylation sites in the B-domain.

[0169] In one embodiment, FVIII is cleaved right after Arginine at amino acid 1648 (in full-length Factor VIII or SEQ ID NO: 65), amino acid 754 (in the S743/Q1638 B-domain deleted Factor VIII or SEQ ID NO: 67), or the corresponding Arginine residue (in other variants), thereby resulting in a heavy chain and a light chain. In another embodiment, FVIII comprises a heavy chain and a light chain, which are linked or associated by a metal ion-mediated non-covalent bond.

[0170] In other embodiments, FVIII is a single chain FVIII that has not been cleaved right after Arginine at amino acid 1648 (in full-length FVIII or SEQ ID NO: 65), amino acid 754 (in the S743/Q1638 B-domain-deleted FVIII or SEQ ID NO: 67), or the corresponding Arginine residue (in other variants). A single chain FVIII may comprise one or more amino acid substitutions. In one embodiment, the amino acid substitution is at a residue corresponding to residue 1648, residue 1645, or both of full-length mature Factor VIII polypeptide (SEQ ID NO: 65) or residue 754, residue 751, or both of SQ BDD Factor VIII (SEQ ID NO: 67). The amino acid substitution can be any amino acids other than Arginine, e.g., isoleucine, leucine, lysine, methionine, phenylalanine, threonine, tryptophan, valine, alanine, asparagine, aspartic acid, cysteine, glutamic acid, glutamine, glycine, proline, selenocysteine, serine, tyrosine, histidine, ornithine, pyrrolysine, or taurine.

[0171] FVIII can further be cleaved by thrombin and then activated as FVIIIa, serving as a cofactor for activated Factor IX (FIXa). And the activated FIX together with activated FVIII forms a Xase complex and converts Factor X to activated Factor X (FXa). For activation, FVIII is cleaved by thrombin after three Arginine residues, at amino acids 372, 740, and 1689 (corresponding to amino acids 372, 740, and 795 in the B-domain deleted FVIII sequence), the cleavage generating FVIIIa having the 50 kDa A1, 43 kDa A2, and 73 kDa A3-C1-C2 chains. In one embodiment, the FVIII protein useful for the present invention is non-active FVIII. In another embodiment, the FVIII protein is an activated FVIII.

[0172] The protein having FVIII polypeptide linked to or associated with the VWF protein can comprise a sequence at least 50%, 60%, 70%, 80%, 90%, 95%, 96%, 97%, 98%, 99%, or 100% identical to SEQ ID NO: 65 or 67, wherein the sequence has the FVIII clotting activity, e.g., activating Factor IX as a cofactor to convert Factor X to activated Factor X (FXa).

[0173] “Hybrid” or “chimeric” polypeptides and proteins, as used herein, includes a combination of a first polypeptide chain, e.g., the VWF protein fused to an XTEN sequence having less than 288 amino acids and a first Ig constant region or a portion thereof, with a second polypeptide chain, e.g., a FVIII protein fused to a second Ig constant region or a portion thereof, thereby forming a heterodimer. In one embodiment, the first polypeptide and the second polypeptide in a hybrid are associated with each other via protein-protein interactions, such as charge-charge or hydrophobic interactions. In another embodiment, a first polypeptide comprises a VWF protein-XTEN-Fc fusion protein, and a second polypeptide comprises FVIII-Fc fusion protein, making the hybrid a heterodimer, wherein the XTEN contains less than 288 amino acids. In other embodiments, the first polypeptide comprises a VWF protein-XTEN-Fc fusion protein, and the second polypeptide comprises FVIII(X)-Fc fusion protein, making the hybrid a heterodimer, wherein the XTEN contains less than 288 amino acids. The first polypeptide and the second polypeptide can be associated through a covalent bond, e.g., a disulfide bond, between the first Fc region and the second Fc region. The first polypeptide and the second polypeptide can further be associated with each other by binding between the VWF fragment and the FVIII protein.

[0174] A FVIII protein useful in the present invention can include FVIII having one or more additional XTEN sequences, which do not affect the FVIII coagulation activity. Such XTEN sequences can be fused to the C-terminus or N-terminus of the FVIII protein or inserted between one or more of the two amino acid residues in the FVIII protein while the insertions do not affect the FVIII coagulation activity or FVIII function. In one embodiment, the insertions improve pharmacokinetic properties of the FVIII protein (e.g., half-life). In another embodiment, the insertions can be multiple insertions, e.g., more than two, three, four, five, six, seven, eight, nine, or ten insertions. Examples of the insertion sites include, but are not limited to, the sites listed in Tables 7, 8, 9, 10, 11, 12, 13, 14, 15 or any combinations thereof.

[0175] The FVIII protein linked to one or more XTEN sequences can be represented as FVIII(X2) or FVIII_{(a→b)}-X-FVIII_{(c→d)}, wherein FVIII_{(a→b)} comprises, consists essentially of, or consists of a first portion of a FVIII protein from amino acid residue “a” to amino acid residue “b”; X2 comprises, consists essentially of, or consists of one or more XTEN sequences, FVIII_{(c→d)} comprises, consists essentially of, or consists of a second portion of a FVIII protein from amino acid residue “c” to amino acid residue “d”;

a is the N-terminal amino acid residue of the first portion of the FVIII protein,
b is the C-terminal amino acid residue of the first portion of the FVIII protein but is also the N-terminal amino acid residue of the two amino acids of an insertion site in which the XTEN sequence is inserted,
c is the N-terminal amino acid residue of the second portion of the FVIII protein but is also the C-terminal amino acid residue of the two amino acids of an insertion site in which the XTEN sequence is inserted, and
d is the C-terminal amino acid residue of the FVIII protein, and
wherein the first portion of the FVIII protein and the second portion of the FVIII protein are not identical to each other and are of sufficient length together such that the FVIII protein has a FVIII coagulation activity.

[0176] In one embodiment, the first portion of the FVIII protein and the second portion of the FVIII protein are fragments of SEQ ID NO: 65 [full length mature FVIII sequence] or SEQ ID NO: 67 [B-domain deleted FVIII], e.g., N-terminal portion and C-terminal portion, respectively. In certain embodiments, the first portion of the FVIII protein comprises the A1 domain and the A2 domain of the FVIII protein. The second portion of the FVIII protein comprises the A3 domain, the C1 domain, and optionally the C2 domain. In yet other embodiments, the first portion of the FVIII protein comprises the A1 domain and A2 domain, and the second portion of the FVIII protein comprises a portion of the B domain, the A3 domain, the C1 domain, and optionally the C2 domain. In still other embodiments, the first portion of the FVIII protein comprises the A1 domain, A2 domain, and a portion of the B domain of the FVIII protein, and the second portion of the FVIII protein comprises the A3 domain, the C1 domain, and optionally the C2 domain. In still other embodiments, the first portion of the FVIII protein comprises the A1 domain, A2 domain, and a first portion of the B domain of the FVIII protein. The second portion of the FVIII protein comprises a second portion of the B domain, the A3 domain, the C1 domain, and optionally the C2 domain. In some embodiments, the two amino acids (“b” and “c”) can be any one or more of the amino acid residues insertion sites shown in Tables 7, 8, 9, 10, 11, 12, 13, 14, and 15. For example, “b” can be the amino acid residue immediately upstream of the site in which one or more XTEN sequences are inserted or linked, and “c” can be the amino acid residue immediately downstream of the site in which the one or more XTEN sequences are inserted or linked. In some embodiments, “a” is the first mature amino acid sequence of a FVIII protein, and “d” is the last amino acid sequence of a FVIII protein. For example, FVIII_{(a→b)} can be an amino acid sequence at least 70%, 80%, 90%, 95%, 96%, 97%, 98%, 99%, or 100% identical to amino acids 1 to 745 of SEQ ID NO: 67 [B domain deleted FVIII amino acid sequence] or SEQ ID NO: 65 [full length FVIII] and FVIII_{(c→d)} can be amino acids 746 to 1438 of SEQ ID NO: 67 or amino acids 1641 to 2332 of SEQ ID NO: 65, respectively.

[0177] In some aspects, the insertion site in the FVIII protein is located in one or more domains of the FVIII protein, which is the N-terminus, the A1 domain, the A2 domain, the A3 domain, the B domain, the C1 domain, the C2 domain, the C-terminus, or two or more combinations thereof or between two domains of the FVIII protein, which are the A1 domain and a1 acidic region, and the a1 acidic region and A2 domain, the A2 domain and a2 acidic region, the a2 acidic region and B domain, the B domain and A3 domain, and the A3 domain and C1 domain, the C1 domain and C2 domain, or any combinations thereof. For example, the insertion sites in which the XTEN sequence can be inserted are selected from the group consisting of the N-terminus and A1 domain, the N-terminus and A2 domain, the N-terminus and A3 domain, the N-terminus and B domain, the N-terminus and C1 domain, the N-terminus and C2 domain, the N-terminus and the C-terminus, the A1 and A2 domains, the A1 and A3 domains, the A1 and B domains, the A1 and C1 domains, the A1 and C2 domains, the A1 domain and the C-terminus, the A2 and A3 domains, the A2 and B domains, the A2 and C1 domains, the A2 and C2 domains, the A2 domain and the C-terminus, the A3 and B domains, the A3 and C1 domains, the A3 and C2 domains, the A3 domain and the C-terminus, the B and C1 domains, the B and C2 domains, the B domain and the C-terminus, the C1 and C2 domains, the C1 and the C-terminus, the C2 domain, and the C-terminus, and two or more combinations thereof. Non-limiting examples of the insertion sites are listed in Tables 7, 8, 9, 10, 11, 12, 13, 14, and 15.

[0178] The FVIII protein, in which the XTEN sequence is inserted immediately downstream of one or more amino acids (e.g., one or more XTEN insertion sites) in the FVIII protein or linked at the C-terminus or the N-terminus, retains the FVIII activity after linkage to or insertion by the XTEN sequence. The XTEN sequence can be inserted in the FVIII protein once or more than once, twice, three times, four times, five times, or six times such that the insertions do not affect the FVIII activity (i.e., the FVIII protein still retains the coagulation property).

[0179] The FVIII protein useful in the present invention can be linked to one or more XTEN polypeptides at the N-terminus or C-terminus of the FVIII protein by an optional linker or inserted immediately downstream of one or more amino acids (e.g., one or more XTEN insertion sites) in the FVIII protein by one or more optional linkers. In one embodiment, the two amino acid residues in which the XTEN sequence is inserted or the amino acid residue to which the XTEN sequence is linked correspond to the two or one amino acid residues of SEQ ID NO: 65 [full length mature FVIII] selected from the group consisting of the residues in Table 7, Table 8, Table 9, and Table 10 and any combinations thereof.

[0180] In other embodiments, at least one XTEN sequence is inserted in any one or more XTEN insertion sites disclosed herein or any combinations thereof. In one aspect, at least one XTEN sequence is inserted in one or more XTEN insertion sites disclosed in one or more amino acids disclosed in Table 7.

TABLE 7
Exemplary XTEN Insertion Sites

| | | | FVIII BDD | |
|---|---|---|---|---|
| | XTEN Insertion | Insertion | Downstream | FVIII |
| No. | Point* | Residue | Sequence | Domain |
| 1 | 0 | (N-terminus) | ATR | A1 |
| 2 | 3 | R | RYY | A1 |
| 3 | 17 | M | QSD | A1 |
| 4 | 18 | Q | SDL | A1 |
| 5 | 22 | G | ELP | A1 |
| 6 | 24 | L | PVD | A1 |
| 7 | 26 | V | DAR | A1 |
| 8 | 28 | A | RFP | A1 |
| 9 | 32 | P | RVP | A1 |
| 10 | 38 | F | PFN | A1 |
| 11 | 40 | F | NTS | A1 |
| 12 | 41 | N | TSV | A1 |
| 13 | 60 | N | IAK | A1 |
| 14 | 61 | I | AKP | A1 |
| 15 | 65 | R | PPW | A1 |
| 16 | 81 | Y | DTV | A1 |
| 17 | 111 | G | AEY | A1 |
| 18 | 116 | D | QTS | A1 |
| 19 | 119 | S | QRE | A1 |
| 20 | 120 | Q | REK | A1 |
| 21 | 128 | V | FPG | A1 |
| 22 | 129 | F | PGG | A1 |
| 23 | 130 | P | GGS | A1 |
| 24 | 182 | G | SLA | A1 |
| 25 | 185 | A | KEK | A1 |
| 26 | 188 | K | TQT | A1 |
| 27 | 205 | G | KSW | A1 |
| 28 | 210 | S | ETK | A1 |
| 29 | 211 | E | TKN | A1 |
| 30 | 216 | L | MQD | A1 |
| 31 | 220 | R | DAA | A1 |
| 32 | 222 | A | ASA | A1 |
| 33 | 223 | A | SAR | A1 |
| 34 | 224 | S | ARA | A1 |
| 35 | 230 | K | MHT | A1 |
| 36 | 243 | P | GLI | A1 |
| 37 | 244 | G | LIG | A1 |
| 38 | 250 | R | KSV | A1 |
| 39 | 318 | D | GME | A1 |
| 40 | 333 | P | QLR | A1 |
| 42 | 334 | Q | LRM | A1 |
| 43 | 336 | R | MKN | a1 |
| 44 | 339 | N | NEE | a1 |
| 45 | 345 | D | YDD | a1 |
| 46 | 357 | V | VRF | a1 |
| 47 | 367 | S | FIQ | a1 |
| 48 | 370 | S | RPY | a1 |
| 49 | 375 | A | KKH | A2 |
| 50 | 376 | K | KHP | A2 |
| 51 | 378 | H | PKT | A2 |
| 52 | 399 | V | LAP | A2 |
| 53 | 403 | D | DRS | A2 |
| 54 | 405 | R | SYK | A2 |
| 55 | 409 | S | QYL | A2 |
| 56 | 416 | P | QRI | A2 |
| 57 | 434 | E | TFK | A2 |
| 58 | 438 | T | REA | A2 |
| 59 | 441 | A | IQH | A2 |
| 60 | 442 | I | QHE | A2 |
| 61 | 463 | I | IFK | A2 |
| 62 | 487 | Y | SRR | A2 |
| 63 | 490 | R | LPK | A2 |
| 64 | 492 | P | KGV | A2 |
| 65 | 493 | K | GVK | A2 |
| 66 | 494 | G | VKH | A2 |
| 67 | 500 | D | FPI | A2 |
| 68 | 506 | G | EIF | A2 |
| 69 | 518 | E | DGP | A2 |
| 70 | 556 | K | ESV | A2 |
| 71 | 565 | Q | IMS | A2 |
| 72 | 566 | I | MSD | A2 |
| 73 | 598 | P | AGV | A2 |
| 74 | 599 | A | GVQ | A2 |
| 75 | 603 | L | EDP | A2 |
| 76 | 616 | S | ING | A2 |
| 77 | 686 | G | LWI | A2 |
| 78 | 713 | K | NTG | A2 |
| 79 | 719 | Y | EDS | A2 |
| 80 | 730 | L | LSK | A2 |
| 81 | 733 | K | NNA | A2 |
| 82 | 745 | N | PPV** | B |
| 83 | 1640 | P | PVL | B |
| 84 | 1652 | R | TTL | B |
| 85 | 1656 | Q | SDQ | A3 |
| 86 | 1685 | N | QSP | A3 |
| 87 | 1711 | M | SSS | A3 |
| 88 | 1713 | S | SPH | A3 |
| 89 | 1720 | N | RAQ | A3 |
| 90 | 1724 | S | GSV | A3 |
| 91 | 1725 | G | SVP | A3 |
| 92 | 1726 | S | VPQ | A3 |
| 93 | 1741 | G | SFT | A3 |
| 94 | 1744 | T | QPL | A3 |
| 95 | 1749 | R | GEL | A3 |
| 96 | 1773 | V | TFR | A3 |
| 97 | 1792 | Y | EED | A3 |
| 98 | 1793 | E | EDQ | A3 |
| 99 | 1796 | Q | RQG | A3 |
| 100 | 1798 | Q | GAE | A3 |
| 101 | 1799 | G | AEP | A3 |
| 102 | 1802 | P | RKN | A3 |
| 103 | 1803 | R | KNF | A3 |
| 104 | 1807 | V | KPN | A3 |
| 105 | 1808 | K | PNE | A3 |
| 106 | 1827 | K | DEF | A3 |
| 107 | 1844 | E | KDV | A3 |
| 108 | 1861 | N | TLN | A3 |
| 109 | 1863 | L | NPA | A3 |
| 110 | 1896 | E | RNC | A3 |
| 111 | 1900 | R | APC | A3 |
| 112 | 1904 | N | IQM | A3 |
| 113 | 1905 | I | QME | A3 |
| 114 | 1910 | P | TFK | A3 |
| 115 | 1920 | A | ING | A3 |
| 116 | 1937 | D | QRI | A3 |
| 117 | 1981 | G | VFE | A3 |
| 118 | 2019 | N | KCQ | A3 |
| 119 | 2020 | K | CQT | C1 |
| 120 | 2044 | G | QWA | C1 |
| 121 | 2068 | F | SWI | C1 |
| 122 | 2073 | V | DLL | C1 |
| 123 | 2090 | R | QKF | C1 |
| 124 | 2092 | K | FSS | C1 |
| 125 | 2093 | F | SSL | C1 |
| 126 | 2111 | K | WQT | C1 |
| 127 | 2115 | Y | RGN | C1 |
| 128 | 2120 | T | GTL | C1 |
| 129 | 2125 | V | FFG | C1 |
| 130 | 2171 | L | NSC | C1 |
| 131 | 2173 | S | CSM | C2 |
| 132 | 2188 | A | QIT | C2 |
| 133 | 2223 | V | NNP | C2 |
| 134 | 2224 | N | NPK | C2 |
| 135 | 2227 | K | EWL | C2 |
| 136 | 2268 | G | HQW | C2 |
| 137 | 2277 | N | GKV | C2 |
| 138 | 2278 | G | KVK | C2 |
| 139 | 2290 | F | TPV | C2 |
| 140 | 2332 | Y | C terminus | CT |
| | | | of FVIII | |

*Indicates an insertion point for XTEN based on the amino acid number of mature full-length human FVIII, wherein the insertion could be either on the N- or C-terminal side of the indicated amino acid.

[0181] In some embodiments, one or more XTEN sequences are inserted within about six amino acids up or down from amino acids 32, 220, 224, 336, 339, 399, 416, 603, 1656, 1711, 1725, 1905, or 1910, corresponding to SEQ ID NO: 65 or any combinations thereof.

TABLE 8
Exemplary XTEN Insertion Ranges

| | | | | | Distance |
|---|---|---|---|---|---|
| | XTEN | | FVIII BDD | | from |
| | Insertion | Insertion | Downstream | FVIII | insertion |
| No. | Point | Residue | Sequence | Domain | residue* |
| 9 | 32 | P | RVP | A1 | −3, +6 |
| 31 | 220 | R | DAA | A1 | — |
| 34 | 224 | S | ARA | A1 | +5 |
| 43 | 336 | R | MKN | a1 | −1, +6 |
| 44 | 339 | N | NEE | a1 | −4, +5 |
| 52 | 399 | V | LAP | A2 | −6, +3 |
| 56 | 416 | P | QRI | A2 | +6 |
| 75 | 603 | L | EDP | A2 | _6, +6 |
| 85 | 1656 | Q | SDQ | B | −3, +6 |
| 87 | 1711 | M | SSS | A3 | −6, +1 |
| 91 | 1725 | G | SVP | A3 | +6 |
| 113 | 1905 | I | QME | A3 | +6 |
| 114 | 1910 | P | TFK | A3 | −5, +6 |

*Distance from insertion residue refers to the relative number of amino acids away from the N-terminus (negative numbers) or C-terminus (positive numbers) of the designated insertion residue (residue “0”) where an insertion may be made. The designation “−x” refers to an insertion site which is x amino acids away on the N-terminal side of the designated insertion residue. Similarly, the designation “+x” refers to an insertion site which is x amino acids away on the C-terminal side of the designated insertion residue. For example, “−1, +2” indicates that the insertion is made at the N-terminus or C-terminus of amino acid residues denoted −1, 0, +1 or +2.

[0182] In other embodiments, one or more XTEN sequences are inserted immediately down stream of one or more amino acids corresponding to the full-length mature human FVIII selected from the group consisting of one or more insertion sites in Table 9.

TABLE 9
Exemplary XTEN Insertion Sites or Ranges

| | XTEN Insertion | First Insertion | FVIII |
|---|---|---|---|
| No. | Point Range* | Residue | Domain |
| 3 | 18-32 | Q | A1 |
| 8 | 40 | F | A1 |
| 18 | 211-224 | E | A1 |
| 27 | 336-403 | R | A1, A2 |
| 43 | 599 | A | A2 |
| 47 | 745-1640 | N | B |
| 50 | 1656-1728 | Q | B, a3, A3 |
| 57 | 1796-1804 | R | A3 |
| 65 | 1900-1912 | R | A3 |
| 81 | 2171-2332 | L | C1, C2 |

*indicates range of insertion sites numbered relative to the amino acid number of mature human FVIII

[0183] In yet other embodiments, one or more XTENs are inserted in the B domain of FVIII. In one example, an XTEN 15 inserted between amino acids 740 and 1640 corresponding to SEQ ID NO: 65, wherein the FVIII sequence between amino acids 740 and 1640 is optionally not present. In another example, an XTEN is inserted between amino acids 741 and 1690 corresponding to SEQ ID NO: 65, wherein the FVIII sequence between amino acids 740 and 1690 is optionally not present. In other examples, an XTEN is inserted between amino acids 741 and 1648 corresponding to SEQ ID NO: 65, wherein the FVIII sequence between amino acids 741 and 1648 is optionally not present. In yet other examples, an XTEN is inserted between amino acids 743 and 1638 corresponding to SEQ ID NO: 65, wherein the FVIII sequence between amino acids 743 and 1638 is optionally not present. In still other examples, an XTEN is inserted between amino acids 745 and 1656 corresponding to SEQ ID NO: 65, wherein the FVIII sequence between amino acids 745 and 1656 is optionally not present. In some examples, an XTEN is inserted between amino acids 745 and 1657 corresponding to SEQ ID NO: 65, wherein the FVIII sequence between amino acids 745 and 1657 is optionally not present. In certain examples, an XTEN is inserted between amino acids 745 and 1667 corresponding to SEQ ID NO: 65, wherein the FVIII sequence between amino acids 745 and 1667 is optionally not present. In still other examples, an XTEN is inserted between amino acids 745 and 1686 corresponding to SEQ ID NO: 65, wherein the FVIII sequence between amino acids 745 and 1686 is optionally not present. In some other examples, an XTEN is inserted between amino acids 747 and 1642 corresponding to SEQ ID NO: 65, wherein the FVIII sequence between amino acids 747 and 1642 is optionally not present. In still other examples, an XTEN 15 inserted between amino acids 751 and 1667 corresponding to SEQ ID NO: 65, wherein the FVIII sequence between amino acids 751 and 1667 is optionally not present.

[0184] In some embodiments, one or more XTENs are inserted in one or more amino acids immediately downstream of an amino acid of an insertion site selected from the group consisting of the amino acid residues in Table 10.

TABLE 10
FVIII XTEN insertion sites and
construct designations

| | | | Down- | | |
|---|---|---|---|---|---|
| | | Upstream | stream | | Down- |
| Construct | | Residue | Residue | Upstream | stream |
| Number | Domain | No.* | No.* | Sequence | Sequence |
| F8X-1 | A1 | 3 | 4 | ATR | RYY |
| F8X-2 | A1 | 18 | 19 | YMQ | SDL |
| F8X-3 | A1 | 22 | 23 | DLG | ELP |
| F8X-4 | A1 | 26 | 27 | LPV | DAR |
| F8X-5 | A1 | 40 | 41 | FPF | NTS |
| F8X-6 | A1 | 60 | 61 | LFN | IAK |
| F8X-7 | A1 | 116 | 117 | YDD | QTS |
| F8X-8 | A1 | 130 | 131 | VFP | GGS |
| F8X-9 | A1 | 188 | 189 | KEK | TQT |
| F8X-10 | A1 | 216 | 217 | NSL | MQD |
| F8X-11 | A1 | 230 | 231 | WPK | MHT |
| F8X-12 | A1 | 333 | 334 | EEP | QLR |
| F8X-13 | A2 | 375 | 376 | SVA | KKH |
| F8X-14 | A2 | 403 | 404 | APD | DRS |
| F8X-15 | A2 | 442 | 443 | EAI | QHE |
| F8X-16 | A2 | 490 | 491 | RRL | PKG |
| F8X-17 | A2 | 518 | 519 | TVE | DGP |
| F8X-18 | A2 | 599 | 600 | NPA | GVQ |
| F8X-19 | A2 | 713 | 714 | CDK | NTG |
| F8X-20 | BD | 745 | 746 | SQN | PPV |
| F8X-21 | BD | 745 | 746 | SQN | PPV |
| F8X-22 | BD** | 745 | 746 | SQN | PPV |
| F8X-23 | A3 | 1720 | 1721 | APT | KDE |
| F8X-24 | A3 | 1796 | 1797 | EDQ | RQG |
| F8X-25 | A3 | 1802 | 1803 | AEP | RKN |
| F8X-26 | A3 | 1827 | 1828 | PTK | DEF |
| F8X-27 | A3 | 1861 | 1862 | HTN | TLN |
| F8X-28 | A3 | 1896 | 1897 | NME | RNC |
| F8X-29 | A3 | 1900 | 1901 | NCR | APC |
| F8X-30 | A3 | 1904 | 1905 | PCN | IQM |
| F8X-31 | A3 | 1937 | 1938 | AQD | QRI |
| F8X-32 | C1 | 2019 | 2020 | YSN | KCQ |
| F8X-33 | C1 | 2068 | 2069 | EPF | SWI |
| F8X-34 | C1 | 2111 | 2112 | GKK | WQT |
| F8X-35 | C1 | 2120 | 2121 | NST | GTL |
| F8X-36 | C2 | 2171 | 2172 | CDL | NSC |
| F8X-37 | C2 | 2188 | 2189 | SDA | QIT |
| F8X-38 | C2 | 2227 | 2228 | NPK | EWL |
| F8X-39 | C2 | 2277 | 2278 | FQN | GKV |
| F8X-40 | CT | 2332 | NA | DLY | NA |
| F8X-41 | CT | 2332 | NA | DLY | NA |
| F8X-42 | A1 | 3 | 4 | ATR | ATR |
| pSD0001 | A2 | 403 | 404 | | |
| pSD0002 | A2 | 599 | 600 | | |
| pSD0021 | N-term | 0 | 1 | | |
| pSD0022 | A1 | 32 | 33 | | |
| pSD0023 | A1 | 65 | 66 | | |
| pSD0024 | A1 | 81 | 82 | | |
| pSD0025 | A1 | 119 | 120 | | |
| pSD0026 | A1 | 211 | 212 | | |
| pSD0027 | A1 | 220 | 221 | | |
| pSD0028 | A1 | 224 | 225 | | |
| pSD0029 | A1 | 336 | 337 | | |
| pSD0030 | A1 | 339 | 340 | | |
| pSD0031 | A2 | 378 | 379 | | |
| pSD0032 | A2 | 399 | 400 | | |
| pSD0033 | A2 | 409 | 410 | | |
| pSD0034 | A2 | 416 | 417 | | |
| pSD0035 | A2 | 487 | 488 | | |
| pSD0036 | A2 | 494 | 495 | | |
| pSD0037 | A2 | 500 | 501 | | |
| pSD0038 | A2 | 603 | 604 | | |
| pSD0039 | A3 | 1656 | 1657 | | |
| pSD0040 | A3 | 1711 | 1712 | | |
| pSD0041 | A3 | 1725 | 1726 | | |
| pSD0042 | A3 | 1749 | 1750 | | |
| pSD0043 | A3 | 1905 | 1906 | | |
| pSD0044 | A3 | 1910 | 1911 | | |
| pDS0062 | A3 | 1900 | 1901 | | |

*Indicates the amino acid number of the mature FVIII protein

[0185] In one embodiment, the one or more XTEN insertion sites are located within one or more surface-exposed, flexible loop structure of the FVIII protein (e.g., a permissive loop). For example, at least one XTEN sequence can be inserted in each FVIII “A” domain comprising at least two “permissive loops” into which at least one XTEN polypeptide can be inserted without eliminating procoagulant activity of the recombinant protein, or the ability of the recombinant proteins to be expressed in vivo or in vitro in a host cell. The permissive loops are regions that allow insertion of at least one XTEN sequence with, among other attributes, high surface or solvent exposure and high conformational flexibility. The A1 domain comprises a permissive loop-1 (A1-1) region and a permissive loop-2 (A1-2) region, the A2 domain comprises a permissive loop-1 (A2-1) region and a permissive loop-2 (A2-2) region, the A3 domain comprises a permissive loop-1 (A3-1) region and a permissive loop-2 (A3-2) region.

[0186] In one aspect, a first permissive loop in the FVIII A1 domain (A1-1) is located between beta strand 1 and beta strand 2, and a second permissive loop in the FVIII A2 domain (A1-2) is located between beta strand 11 and beta strand 12. A first permissive loop in the FVIII A2 domain (A2-1) is located between beta strand 22 and beta strand 23, and a second permissive loop in the FVIII A2 domain (A2-2) is located between beta strand 32 and beta strand 33. A first permissive loop in the FVIII A3 domain (A3-1) is located between beta strand 38 and beta strand 39, and a second permissive loop in the FVIII A3 (A3-2) is located between beta strand 45 and beta strand 46. In certain aspects, the surface-exposed, flexible loop structure comprising A1-1 corresponds to a region in native mature human FVIII from about amino acid 15 to about amino acid 45 of SEQ ID NO: 65, e.g., from about amino acid 18 to about amino acid 41 of SEQ ID NO: 65. In other aspects, the surface-exposed, flexible loop structure comprising A1-2 corresponds to a region in native mature human FVIII from about amino acid 201 to about amino acid 232 of SEQ ID NO: 65, e.g., from about amino acid 218 to about amino acid 229 of SEQ ID NO: 65. In yet other aspects, the surface-exposed, flexible loop structure comprising A2-1 corresponds to a region in native mature human FVIII from about amino acid 395 to about amino acid 421 of SEQ ID NO: 65, e.g. from about amino acid 397 to about amino acid 418 of SEQ ID NO: 65. In still other embodiments, the surface-exposed, flexible loop structure comprising A2-2 corresponds to a region in native mature human FVIII from about amino acid 577 to about amino acid 635 of SEQ ID NO: 65, e.g., from about amino acid 595 to about amino acid 607 of SEQ ID NO: 65. In certain aspects the surface-exposed, flexible loop structure comprising A3-1 corresponds to a region in native mature human FVIII from about amino acid 1705 to about amino acid 1732 of SEQ ID NO: 65, e.g., from about amino acid 1711 to about amino acid 1725 of SEQ ID NO: 65. In yet other aspects, the surface-exposed, flexible loop structure comprising A3-2 corresponds to a region in native mature human FVIII from about amino acid 1884 to about amino acid 1917 of SEQ ID NO: 65, e.g., from about amino acid 1899 to about amino acid 1911 of SEQ ID NO: 65.

[0187] In another embodiment, the one or more amino acids in which at least one XTEN sequence is inserted is located within a3 domain, e.g., amino acids 1649 to 1689, corresponding to full-length mature FVIII polypeptide. In a particular embodiment, an XTEN sequence is inserted between amino acids 1656 and 1657 of SEQ ID NO: 65 (full-length mature FVIII). In a specific embodiment, a FVIII protein comprising an XTEN sequence inserted immediately downstream of amino acid 1656 corresponding to SEQ ID NO: 65 further comprises a deletion from amino acid 745 to amino acid 1656 corresponding to SEQ ID NO: 65.

[0188] In some embodiments, the one or more insertion sites for one or more XTEN insertions are immediately downstream of one or more amino acids corresponding to mature full-length FVIII, selected from the group consisting of:

| | | |
|---|---|---|
| (1) amino acid 3, | (2) amino acid 18, | (3) amino acid 22, |
| (4) amino acid 26, | (5) amino acid 32, | (6) amino acid 40, |
| (7) amino acid 60, | (8) amino acid 65, | (9) amino acid 81, |
| (10) amino acid 116, | (11) amino acid 119, | (12) amino acid 130, |
| (13) amino acid 188, | (14) amino acid 211, | (15) amino acid 216, |
| (16) amino acid 220, | (17) amino acid 224, | (18) amino acid 230, |
| (19) amino acid 333, | (20) amino acid 336, | (21) amino acid 339, |
| (22) amino acid 375, | (23) amino acid 399, | (24) amino acid 403, |
| (25) amino acid 409, | (26) amino acid 416, | (26) amino acid 442, |
| (28) amino acid 487, | (29) amino acid 490, | (30) amino acid 494, |
| (31) amino acid 500, | (32) amino acid 518, | (33) amino acid 599, |
| (34) amino acid 603, | (35) amino acid 713, | (36) amino acid 745, |
| (37) amino acid 1656, | (38) amino acid 1711, | (39) amino acid 1720, |
| (40) amino acid 1725, | (41) amino acid 1749, | (42) amino acid 1796, |
| (43) amino acid 1802, | (44) amino acid 1827, | (45) amino acid 1861, |
| (46) amino acid 1896, | (47) amino acid 1900, | (48) amino acid 1904, |
| (49) amino acid 1905, | (50) amino acid 1910, | (51) amino acid 1937, |
| (52) amino acid 2019, | (53) amino acid 2068, | (54) amino acid 2111, |
| (55) amino acid 2120, | (56) amino acid 2171, | (57) amino acid 2188, |
| (58) amino acid 2227, | (59) amino acid 2277, | |
| | and | |
| (60) two or more | | |
| combinations thereof. | | |

[0189] In one embodiment, a FVIII protein useful for the invention comprises two XTEN sequences, a first XTEN sequence inserted into a first XTEN insertion site and a second XTEN inserted into a second XTEN insertion site. Non-limiting examples of the first XTEN insertion site and the second XTEN insertion site are listed in Table 11.

TABLE 11
Exemplary Insertion Sites for Two XTENs

| | |
|---|---|
| Insertion 1 | Insertion 2 |

| Insertion Site | Domain | Insertion Site | Domain |
|---|---|---|---|
| 745 | B | 2332 | CT |
| 26 | A1 | 403 | A2 |
| 40 | A1 | 403 | A2 |
| 18 | A1 | 403 | A2 |
| 26 | A1 | 599 | A2 |
| 40 | A1 | 599 | A2 |
| 18 | A1 | 599 | A2 |
| 1720 | A3 | 1900 | A3 |
| 1725 | A3 | 1900 | A3 |
| 1711 | A3 | 1905 | A3 |
| 1720 | A3 | 1905 | A3 |
| 1725 | A3 | 1905 | A3 |
| 1656 | A3 | 26 | A1 |
| 1656 | A3 | 18 | A1 |
| 1656 | A3 | 40 | A1 |
| 1656 | A3 | 399 | A2 |
| 1656 | A3 | 403 | A2 |
| 1656 | A3 | 1725 | A3 |
| 1656 | A3 | 1720 | A3 |
| 1900 | A3 | 18 | A1 |
| 1900 | A3 | 26 | A1 |
| 1900 | A3 | 40 | A1 |
| 1905 | A3 | 18 | A1 |
| 1905 | A3 | 40 | A1 |
| 1905 | A3 | 26 | A1 |
| 1910 | A3 | 26 | A1 |
| 18 | A1 | 399 | A2 |
| 26 | A1 | 399 | A2 |
| 40 | A1 | 399 | A2 |
| 18 | A1 | 403 | A2 |
| 1656 | A3 | 1900 | A3 |
| 1656 | A3 | 1905 | A3 |
| 1711 | A3 | 40 | A1 |
| 1711 | A3 | 26 | A1 |
| 1720 | A3 | 26 | A1 |
| 1720 | A3 | 40 | A1 |
| 1720 | A3 | 18 | A1 |
| 1725 | A3 | 26 | A1 |
| 1725 | A3 | 40 | A1 |
| 1725 | A3 | 18 | A1 |
| 1720 | A3 | 403 | A2 |
| 1720 | A3 | 399 | A2 |
| 1711 | A3 | 403 | A2 |
| 1720 | A3 | 403 | A2 |
| 1725 | A3 | 403 | A2 |
| 1725 | A3 | 399 | A2 |
| 1711 | A3 | 403 | A2 |
| 1900 | A3 | 399 | A2 |
| 1900 | A3 | 403 | A2 |
| 1905 | A3 | 403 | A2 |
| 1905 | A3 | 399 | A2 |
| 1910 | A3 | 403 | A2 |

[0190] The two XTENs inserted or linked to the FVIII protein can be identical or different. In some embodiments, a FVIII protein useful for the invention comprises two XTEN sequences inserted in the FVIII protein, a first XTEN sequence inserted immediately downstream of amino acid 745 corresponding to SEQ ID NO: 65, and a second XTEN sequence inserted immediately downstream of amino acid 2332 corresponding to SEQ ID NO: 65 (the C-terminus). In other embodiments, the first XTEN sequence is inserted immediately downstream of amino acid 18, 26, 40, 1656, or 1720 corresponding to SEQ ID NO: 65, and a second XTEN sequence inserted immediately downstream of amino acid 403 corresponding to SEQ ID NO: 65. In yet other embodiments, the first XTEN sequence is inserted immediately downstream of amino acid 18, 26, or 40 corresponding to SEQ ID NO: 65, and a second XTEN sequence inserted immediately downstream of amino acid 599 corresponding to SEQ ID NO: 65. In still other embodiments, the first XTEN sequence is inserted immediately downstream of amino acid 1656 corresponding to SEQ ID NO: 65, and a second XTEN sequence inserted immediately downstream of amino acid 18, 26, 40, 399, 403, 1725, 1720, 1900, 1905, or 2332 corresponding to SEQ ID NO: 65. In certain embodiments, the first XTEN sequence is inserted immediately downstream of amino acid 1900 corresponding to SEQ ID NO: 65, and a second XTEN sequence inserted immediately downstream of amino acid 18, 26, or 40 corresponding to SEQ ID NO: 65. In some embodiments, the first XTEN sequence is inserted immediately downstream of amino acid 18, 26, or 40 corresponding to SEQ ID NO: 65, and a second XTEN sequence inserted immediately downstream of amino acid 399 corresponding to SEQ ID NO: 65. In other embodiments, the first XTEN sequence is inserted immediately downstream of amino acid 1720 corresponding to SEQ ID NO: 65, and a second XTEN sequence inserted immediately downstream of amino acid 18, 26, or 40 corresponding to SEQ ID NO: 65. In still other embodiments, the first XTEN sequence is inserted immediately downstream of amino acid 1720 corresponding to SEQ ID NO: 65, and a second XTEN sequence inserted immediately downstream of amino acid 18 corresponding to SEQ ID NO: 65. In a particular embodiment, the FVIII protein comprising two XTEN sequences, a first XTEN sequence inserted immediately downstream of amino acid 745 corresponding to SEQ ID NO: 65 and a second XTEN sequence inserted immediately downstream of amino acid 2332 corresponding to SEQ ID NO: 65, wherein the FVIII protein further has a deletion from amino acid 745 corresponding to SEQ ID NO: 65 to amino acid 1685 corresponding to SEQ ID NO: 65, a mutation or substitution at amino acid 1680 corresponding to SEQ ID NO: 65, e.g., Y1680F, a mutation or substitution at amino acid 1648 corresponding to SEQ ID NO: 65, e.g., R1648A, or at least two mutations or substitutions at amino acid 1648 corresponding to SEQ ID NO: 65, e.g., R1648A, and amino acid 1680 corresponding to SEQ ID NO: 65, e.g., Y1680F. In a specific embodiment, the FVIII protein comprises two XTEN sequences, a first XTEN inserted immediately downstream of amino acid 1656 corresponding to SEQ ID NO: 65 and a second XTEN sequence inserted immediately downstream of amino acid 2332 of SEQ ID NO: 65, wherein the FVIII protein further has a deletion from amino acid 745 to amino acid 1656 corresponding to SEQ ID NO: 65.

[0191] In certain embodiments, a FVIII protein comprises three XTEN sequences, a first XTEN sequence inserted into a first XTEN insertion site, a second XTEN sequence inserted into a second XTEN sequence, and a third XTEN sequence inserted into a third XTEN insertion site. The first, second, or third XTEN sequences can be identical or different. The first, second, and third insertion sites can be selected from the group of any one of the insertion sites disclosed herein. In some embodiments, the FVIII protein comprising three XTEN sequences can further comprise a mutation or substitution, e.g., amino acid 1648 corresponding to SEQ ID NO: 65, e.g., R1648A. For example, non-limiting examples of the first, second, and third XTEN insertion sites are listed in Table 12.

TABLE 12
Exemplary Insertion Sites for Three XTENs

| Insertion 1 | | Insertion 2 | | Insertion 3 | |
|---|---|---|---|---|---|
| Insertion Site | Domain | Insertion Site | Domain | Insertion Site | Domain |
| 26 | A1 | 403 | A2 | 1656 | A3 |
| 26 | A1 | 403 | A2 | 1720 | A3 |
| 26 | A1 | 403 | A2 | 1900 | A3 |
| 26 | A1 | 1656 | A3 | 1720 | A3 |
| 26 | A1 | 1656 | A3 | 1900 | A3 |
| 26 | A1 | 1720 | A3 | 1900 | A3 |
| 403 | A2 | 1656 | A3 | 1720 | A3 |
| 403 | A2 | 1656 | A3 | 1900 | A3 |
| 403 | A2 | 1720 | A3 | 1900 | A3 |
| 1656 | A3 | 1720 | A3 | 1900 | A3 |
| 745 | B | 1900 | | 2332 | |
| 18 | A1 | 745 | B | 2332 | CT |
| 26 | A1 | 745 | B | 2332 | CT |
| 40 | A1 | 745 | B | 2332 | CT |
| 18 | A1 | 745 | B | 2332 | CT |
| 40 | A1 | 745 | B | 2332 | CT |
| 403 | A2 | 745 | B | 2332 | CT |
| 399 | A2 | 745 | B | 2332 | CT |
| 1725 | A3 | 745 | B | 2332 | CT |
| 1720 | A3 | 745 | B | 2332 | CT |
| 1711 | A3 | 745 | B | 2332 | CT |
| 1900 | A3 | 745 | B | 2332 | CT |
| 1905 | A3 | 745 | B | 2332 | CT |
| 1910 | A3 | 745 | B | 2332 | CT |

[0192] In some embodiments, a FVIII protein comprises three XTEN sequences, a first XTEN sequence inserted immediately downstream of amino acid 26 corresponding to SEQ ID NO: 65, a second XTEN sequence inserted downstream of amino acid 403 corresponding to SEQ ID NO: 65, and a third XTEN sequence inserted downstream of amino acid 1656, 1720, or 1900 corresponding to SEQ ID NO: 65. In other embodiments, the first XTEN sequence is inserted immediately downstream of amino acid 26 corresponding to SEQ ID NO: 65, a second XTEN sequence is inserted downstream of amino acid 1656 corresponding to SEQ ID NO: 65, and a third XTEN sequence is inserted downstream of amino acid 1720 or 1900 corresponding to SEQ ID NO: 65. In yet other embodiments, the first XTEN sequence is inserted immediately downstream of amino acid 26 corresponding to SEQ ID NO: 65, a second XTEN sequence is inserted downstream of amino acid 1720 corresponding to SEQ ID NO: 65, and a third XTEN sequence is inserted downstream of amino acid 1900 corresponding to SEQ ID NO: 65. In still other embodiments, the first XTEN sequence is inserted immediately downstream of amino acid 403 corresponding to SEQ ID NO: 65, a second XTEN sequence is inserted downstream of amino acid 1656 corresponding to SEQ ID NO: 65, and a third XTEN sequence is inserted downstream of amino acid 1720 or 1900 corresponding to SEQ ID NO: 65. In other embodiments, the first XTEN sequence is inserted immediately downstream of amino acid 403 or 1656 corresponding to SEQ ID NO: 65, a second XTEN sequence is inserted downstream of amino acid 1720 corresponding to SEQ ID NO: 65, and a third XTEN sequence is inserted downstream of amino acid 1900 corresponding to SEQ ID NO: 65. In other embodiments, the first XTEN sequence is inserted immediately downstream of amino acid 18, 26, 40, 399, 403, 1711, 1720, 1725, 1900, 1905, or 1910 corresponding to SEQ ID NO: 65, a second XTEN sequence is inserted downstream of amino acid 745 corresponding to SEQ ID NO: 65, and a third XTEN sequence is inserted downstream of amino acid 2332 corresponding to SEQ ID NO: 65.

[0193] In other embodiments, a FVIII protein in the invention comprises four XTEN sequences, a first XTEN sequence inserted into a first insertion site, a second XTEN sequence inserted into a second insertion site, a third XTEN sequence inserted into a third insertion site, and a fourth XTEN sequence inserted into a fourth insertion site. The first, second, third, and fourth XTEN sequences can be identical, different, or combinations thereof. In some embodiments, the FVIII protein comprising four XTEN sequences can further comprise a mutation or substitution, e.g., amino acid 1648 corresponding to SEQ ID NO: 65, e.g., R1648A. Non-limiting examples of the first, second, third, and fourth XTEN insertion sites are listed in Table 13.

TABLE 13
Exemplary Insertion Sites for Four XTENs

| Insertion 1 | | Insertion 2 | | Insertion 3 | | Insertion 4 | |
|---|---|---|---|---|---|---|---|
| Insertion Site | Domain | Insertion Site | Domain | Insertion Site | Domain | Insertion Site | Domain |
| 26 | A1 | 403 | A2 | 1656 | a3 | 1720 | A3 |
| 26 | A1 | 403 | A2 | 1656 | a3 | 1900 | A3 |
| 26 | A1 | 403 | A2 | 1720 | A3 | 1900 | A3 |
| 26 | A1 | 1656 | a3 | 1720 | A3 | 1900 | A3 |
| 403 | A2 | 1656 | a3 | 1720 | A3 | 1900 | A3 |
| 0040 | A1 | 0403 | A2 | 745 | B | 2332 | CT |
| 0040 | A1 | 0403 | A2 | 745 | B | 2332 | CT |
| 0018 | A1 | 0409 | A2 | 745 | B | 2332 | CT |
| 0040 | A1 | 0409 | A2 | 745 | B | 2332 | CT |
| 0040 | A1 | 0409 | A2 | 745 | B | 2332 | CT |
| 0018 | A1 | 0409 | A2 | 745 | B | 2332 | CT |
| 0040 | A1 | 1720 | A3 | 745 | B | 2332 | CT |
| 0026 | A1 | 1720 | A3 | 745 | B | 2332 | CT |
| 0018 | A1 | 1720 | A3 | 745 | B | 2332 | CT |
| 0018 | A1 | 1720 | A3 | 745 | B | 2332 | CT |
| 0018 | A1 | 1720 | A3 | 745 | B | 2332 | CT |
| 0026 | A1 | 1720 | A3 | 745 | B | 2332 | CT |
| 0018 | A1 | 1720 | A3 | 745 | B | 2332 | CT |
| 0018 | A1 | 1900 | A3 | 745 | B | 2332 | CT |
| 0018 | A1 | 1900 | A3 | 745 | B | 2332 | CT |
| 0026 | A1 | 1900 | A3 | 745 | B | 2332 | CT |
| 0040 | A1 | 1900 | A3 | 745 | B | 2332 | CT |
| 0040 | A1 | 1905 | A3 | 745 | B | 2332 | CT |
| 0018 | A1 | 1905 | A3 | 745 | B | 2332 | CT |
| 0040 | A1 | 1905 | A3 | 745 | B | 2332 | CT |
| 0026 | A1 | 1905 | A3 | 745 | B | 2332 | CT |
| 0018 | A1 | 1905 | A3 | 745 | B | 2332 | CT |
| 0018 | A1 | 1905 | A3 | 745 | B | 2332 | CT |
| 0018 | A1 | 1910 | A3 | 745 | B | 2332 | CT |
| 0018 | A1 | 1910 | A3 | 745 | B | 2332 | CT |
| 0040 | A1 | 1910 | A3 | 745 | B | 2332 | CT |
| 0026 | A1 | 1910 | A3 | 745 | B | 2332 | CT |
| 0018 | A1 | 1910 | A3 | 745 | B | 2332 | CT |
| 0026 | A1 | 1910 | A3 | 745 | B | 2332 | CT |
| 0040 | A1 | 1910 | A3 | 745 | B | 2332 | CT |
| 0018 | A1 | 1910 | A3 | 745 | B | 2332 | CT |
| 0409 | A2 | 1720 | A3 | 745 | B | 2332 | CT |
| 0403 | A2 | 1720 | A3 | 745 | B | 2332 | CT |
| 0409 | A2 | 1720 | A3 | 745 | B | 2332 | CT |
| 0403 | A2 | 1720 | A3 | 745 | B | 2332 | CT |
| 0403 | A2 | 1720 | A3 | 745 | B | 2332 | CT |
| 0403 | A2 | 1900 | A3 | 745 | B | 2332 | CT |
| 0403 | A2 | 1900 | A3 | 745 | B | 2332 | CT |
| 0409 | A2 | 1900 | A3 | 745 | B | 2332 | CT |
| 0403 | A2 | 1900 | A3 | 745 | B | 2332 | CT |
| 0403 | A2 | 1900 | A3 | 745 | B | 2332 | CT |
| 0409 | A2 | 1900 | A3 | 745 | B | 2332 | CT |
| 0409 | A2 | 1905 | A3 | 745 | B | 2332 | CT |
| 0403 | A2 | 1905 | A3 | 745 | B | 2332 | CT |
| 0403 | A2 | 1905 | A3 | 745 | B | 2332 | CT |
| 0403 | A2 | 1905 | A3 | 745 | B | 2332 | CT |
| 0409 | A2 | 1905 | A3 | 745 | B | 2332 | CT |
| 0403 | A2 | 1905 | A3 | 745 | B | 2332 | CT |
| 0409 | A2 | 1910 | A3 | 745 | B | 2332 | CT |
| 0403 | A2 | 1910 | A3 | 745 | B | 2332 | CT |
| 0403 | A2 | 1910 | A3 | 745 | B | 2332 | CT |
| 0403 | A2 | 1910 | A3 | 745 | B | 2332 | CT |
| 0403 | A2 | 1910 | A3 | 745 | B | 2332 | CT |
| 1720 | A3 | 1900 | A3 | 745 | B | 2332 | CT |
| 1720 | A3 | 1905 | A3 | 745 | B | 2332 | CT |
| 1720 | A3 | 1910 | A3 | 745 | B | 2332 | CT |
| 1720 | A3 | 1910 | A3 | 745 | B | 2332 | CT |
| 0403 | A2 | 1656 | a3 | 1720 | A3 | 2332 | CT |
| 0403 | A2 | 1656 | a3 | 1900 | A3 | 2332 | CT |
| 0403 | A2 | 1720 | A3 | 1900 | A3 | 2332 | CT |
| 1656 | a3 | 1720 | A3 | 1900 | A3 | 2332 | CT |
| 0018 | A1 | 0403 | A2 | 1656 | a3 | 2332 | CT |
| 0018 | A1 | 0403 | A2 | 1720 | A3 | 2332 | CT |
| 0018 | A1 | 0403 | A2 | 1900 | A3 | 2332 | CT |
| 0018 | A1 | 1656 | a3 | 1720 | A3 | 2332 | CT |
| 0018 | A1 | 1656 | a3 | 1900 | A3 | 2332 | CT |
| 0018 | A1 | 1720 | A3 | 1900 | A3 | 2332 | CT |
| 0018 | A1 | 0403 | A2 | 0745 | B | 2332 | CT |
| 0018 | A1 | 0745 | B | 1720 | A3 | 2332 | CT |
| 0018 | A1 | 0745 | B | 1900 | A3 | 2332 | CT |
| 0403 | A2 | 0745 | B | 1720 | A3 | 2332 | CT |
| 0403 | A2 | 0745 | B | 1900 | A3 | 2332 | CT |
| 0745 | B | 1720 | A3 | 1900 | A3 | 2332 | CT |
| 0188 | A1 | 1900 | A3 | 0745 | B | 2332 | CT |
| 0599 | | 1900 | A3 | 0745 | B | 2332 | CT |
| 2068 | | 1900 | A3 | 0745 | B | 2332 | CT |
| 2171 | | 1900 | A3 | 0745 | B | 2332 | CT |
| 2227 | | 1900 | A3 | 0745 | B | 2332 | CT |
| 2277 | | 1900 | A3 | 0745 | B | 2332 | CT |

[0194] In some embodiments, a FVIII protein comprises five XTEN sequences, a first XTEN sequence inserted into a first insertion site, a second XTEN sequence inserted into a second insertion site, a third XTEN sequence inserted into a third XTEN insertion site, a fourth XTEN sequence inserted into a fourth XTEN insertion site, and a fifth XTEN sequence inserted into a fifth XTEN insertion site. The first, second, third, fourth, of fifth XTEN sequences can be identical, different, or combinations thereof. Non-limiting examples of the first, second, third, fourth, and fifth insertion sites are listed in Table 14.

TABLE 14
Exemplary Insertion Sites for Five XTENs

| XTEN | XTEN | XTEN | XTEN | XTEN |
|---|---|---|---|---|
| Insertion 1 | insertion 2 | Insertion 3 | Insertion 4 | Insertion 5 |
| 0403 | 1656 | 1720 | 1900 | 2332 |
| 0018 | 0403 | 1656 | 1720 | 2332 |
| 0018 | 0403 | 1656 | 1900 | 2332 |
| 0018 | 0403 | 1720 | 1900 | 2332 |
| 0018 | 1656 | 1720 | 1900 | 2332 |
| 0018 | 0403 | 0745 | 1720 | 2332 |
| 0018 | 0403 | 0745 | 1900 | 2332 |
| 0018 | 0745 | 1720 | 1900 | 2332 |
| 0403 | 0745 | 1720 | 1900 | 2332 |

[0195] In certain embodiments, a FVIII protein comprises six XTEN sequences, a first XTEN sequence inserted into a first XTEN insertion site, a second XTEN sequence inserted into a second XTEN insertion site, a third XTEN sequence inserted into a third XTEN insertion site, a fourth XTEN sequence inserted into a fourth XTEN insertion site, a fifth XTEN sequence inserted into a fifth XTEN insertion site, and a sixth XTEN sequence inserted into a sixth XTEN insertion site. The first, second, third, fourth, fifth, or sixth XTEN sequences can be identical, different, or combinations thereof. Examples of the six XTEN insertion sites include, but are not limited to the insertion sites listed in Table 15.

TABLE 15
Exemplary XTEN Insertion Sites for Six XTENs

| XTEN | XTEN | XTEN | XTEN | XTEN | XTEN |
|---|---|---|---|---|---|
| Insertion 1 | insertion 2 | Insertion 3 | Insertion 4 | Insertion 5 | Insertion 5 |
| 0018 | 0403 | 1656 | 1720 | 1900 | 2332 |
| 0018 | 0403 | 0745 | 1720 | 1900 | 2332 |

[0196] In a particular example, a first XTEN is inserted between amino acids 26 and 27 corresponding to SEQ ID NO: 65, and a second XTEN is inserted between amino acids 1720 and 1721 corresponding to SEQ ID NO: 65 (full-length mature FVIII). In another example, a first XTEN is inserted between amino acids 403 and 404 corresponding to SEQ ID NO: 65, and a second XTEN is inserted between amino acids 1720 and 1721 corresponding to SEQ ID NO: 65. In some examples, a first XTEN is inserted between amino acids 1656 and 1657 corresponding to SEQ ID NO: 65, and a second XTEN is inserted between amino acids 1720 and 1721 corresponding to SEQ ID NO: 65. In other examples, a first XTEN is inserted between amino acids 26 and 27 corresponding to SEQ ID NO: 65, a second XTEN is inserted between amino acids 1656 and 1657 corresponding to SEQ ID NO: 65, and a third XTEN is inserted between amino acids 1720 and 1721 corresponding to SEQ ID NO: 65. In yet other embodiments, a first XTEN is inserted between amino acids 403 and 404 corresponding to SEQ ID NO: 65, a second XTEN is inserted between amino acids 1656 and 1657 corresponding to SEQ ID NO: 65, and a third XTEN is inserted between amino acids 1720 and 1721 corresponding to SEQ ID NO: 65. In still other embodiments, a first XTEN is inserted between amino acids 403 and 404 corresponding to SEQ ID NO: 65, a second XTEN is inserted between amino acids 1656 and 1657 corresponding to SEQ ID NO: 65, and a third XTEN is inserted between amino acids 1720 and 1721 corresponding to SEQ ID NO: 65. In certain embodiments, a first XTEN is inserted between amino acids 26 and 27 corresponding to SEQ ID NO: 65, a second XTEN is inserted between amino acids 1720 and 1721 corresponding to SEQ ID NO: 65, and a third XTEN is inserted between amino acids 1900 and 1901 corresponding to SEQ ID NO: 65. In some embodiments, a first XTEN is inserted between amino acids 26 and 27 corresponding to SEQ ID NO: 65, a second XTEN is inserted between amino acids 1656 and 1657 corresponding to SEQ ID NO: 65, a third XTEN is inserted between amino acids 1720 and 1721 corresponding to SEQ ID NO: 65, and a fourth XTEN is inserted between 1900 and 1901 corresponding to SEQ ID NO: 65.

[0197] In a particular embodiment, an XTEN sequence is inserted between amino acids 745 and 746 of a full-length Factor VIII or the corresponding insertion site of the B-domain deleted Factor VIII.

[0198] In some embodiments, a chimeric protein of the invention comprises two polypeptide sequences, a first polypeptide sequence comprising an amino acid sequence at least about 80%, 90%, 95%, or 100% identical to a sequence selected from FVIII-161 (SEQ ID NO: 69), FVIII-169 (SEQ ID NO: 70), FVIII-170 (SEQ ID NO: 71), FVIII-173 (SEQ ID NO: 72); FVIII-195 (SEQ ID NO: 73); FVIII-196 (SEQ ID NO: 74), FVIII199 (SEQ ID NO: 75), FVIII-201 (SEQ ID NO: 76); FVIII-203 (SEQ ID NO: 77), FVIII-204 (SEQ ID NO: 78), FVIII-205 (SEQ ID NO: 79), FVIII-266 (SEQ ID NO: 80), FVIII-267 (SEQ ID NO: 81), FVIII-268 (SEQ ID NO: 82), FVIII-269 (SEQ ID NO: 83), FVIII-271 (SEQ ID NO: 84) or FVIII-272 (SEQ ID NO: 85) and a second polypeptide sequence comprising an amino acid sequence at least about 80%, 90%, 95%, or 100% identical to a sequence selected from VWF031 (SEQ ID NO: 86), VWF034 (SEQ ID NO: 87), or VWF-036.

### II.D. Ig Constant Region or a Portion Thereof

[0199] The chimeric protein of the invention also includes two Ig constant region or a portion thereof, a first Ig constant region or a portion thereof fused to a FVIII protein by an optional linker and a second Ig constant region or a portion thereof fused to a VWF protein through the XTEN sequence having less than 288 amino acids. The Ig constant region or a portion thereof can improve pharmacokinetic or pharmacodynamic properties of the chimeric protein in combination with the XTEN sequence and the VWF protein. In certain embodiments, the Ig constant region or a portion thereof extends a half-life of a molecule fused to the Ig constant region or a portion thereof.

[0200] An Ig constant region is comprised of domains denoted CH (constant heavy) domains (CH1, CH2, etc.). Depending on the isotype, (i.e. IgG, IgM, IgA, IgD, or IgE), the constant region can be comprised of three or four CH domains. Some isotypes (e.g. IgG) constant regions also contain a hinge region. See Janeway et al. 2001, Immunobiology, Garland Publishing, N.Y., N.Y.

[0201] An Ig constant region or a portion thereof for producing the chimeric protein of the present invention may be obtained from a number of different sources. In some embodiments, an Ig constant region or a portion thereof is derived from a human Ig. It is understood, however, that the Ig constant region or a portion thereof may be derived from an Ig of another mammalian species, including for example, a rodent (e.g. a mouse, rat, rabbit, guinea pig) or non-human primate (e.g. chimpanzee, macaque) species. Moreover, the Ig constant region or a portion thereof may be derived from any Ig class, including IgM, IgG, IgD, IgA, and IgE, and any Ig isotype, including IgG1, IgG2, IgG3, and IgG4. In one embodiment, the human isotype IgG1 is used.

[0202] A variety of the Ig constant region gene sequences (e.g., human constant region gene sequences) are available in the form of publicly accessible deposits. Constant region domains sequence can be selected having a particular effector function (or lacking a particular effector function) or with a particular modification to reduce immunogenicity. Many sequences of antibodies and antibody-encoding genes have been published and suitable Ig constant region sequences (e.g., hinge, CH2, and/or CH3 sequences, or portions thereof) can be derived from these sequences using art recognized techniques. The genetic material obtained using any of the foregoing methods may then be altered or synthesized to obtain polypeptides of the present invention. It will further be appreciated that the scope of this invention encompasses alleles, variants and mutations of constant region DNA sequences.

[0203] The sequences of the Ig constant region or a portion thereof can be cloned, e.g., using the polymerase chain reaction and primers which are selected to amplify the domain of interest. To clone a sequence of the Ig constant region or a portion thereof from an antibody, mRNA can be isolated from hybridoma, spleen, or lymph cells, reverse transcribed into DNA, and antibody genes amplified by PCR. PCR amplification methods are described in detail in U.S. Pat. Nos. 4,683,195; 4,683,202; 4,800,159; 4,965,188; and in, e.g., “PCR Protocols: A Guide to Methods and Applications” Innis et al. eds., Academic Press, San Diego, Calif. (1990); Ho et al. 1989. Gene 77:51; Horton et al. 1993. Methods Enzymol. 217:270). PCR may be initiated by consensus constant region primers or by more specific primers based on the published heavy and light chain DNA and amino acid sequences. As discussed above, PCR also may be used to isolate DNA clones encoding the antibody light and heavy chains. In this case the libraries may be screened by consensus primers or larger homologous probes, such as mouse constant region probes. Numerous primer sets suitable for amplification of antibody genes are known in the art (e.g., 5′ primers based on the N-terminal sequence of purified antibodies (Benhar and Pastan. 1994. Protein Engineering 7:1509); rapid amplification of cDNA ends (Ruberti, F. et al. 1994. J. Immunol. Methods 173:33); antibody leader sequences (Larrick et al. 1989 Biochem. Biophys. Res. Commun. 160:1250). The cloning of antibody sequences is further described in Newman et al., U.S. Pat. No. 5,658,570, filed Jan. 25, 1995, which is incorporated by reference herein.

[0204] An Ig constant region used herein can include all domains and the hinge region or portions thereof. In one embodiment, the Ig constant region or a portion thereof comprises CH2 domain, CH3 domain, and a hinge region, i.e., an Fc region or an FcRn binding partner.

[0205] As used herein, the term “Fc region” is defined as the portion of a polypeptide which corresponds to the Fc region of native Ig, i.e., as formed by the dimeric association of the respective Fc domains of its two heavy chains. A native Fc region forms a homodimer with another Fc region. In contrast, the term “genetically-fused Fc region” or “single-chain Fc region” (scFc region), as used herein, refers to a synthetic dimeric Fc region comprised of Fc domains genetically linked within a single polypeptide chain (i.e., encoded in a single contiguous genetic sequence).

[0206] In one embodiment, the “Fc region” refers to the portion of a single Ig heavy chain beginning in the hinge region just upstream of the papain cleavage site (i.e. residue 216 in IgG, taking the first residue of heavy chain constant region to be 114) and ending at the C-terminus of the antibody. Accordingly, a complete Fc domain comprises at least a hinge domain, a CH2 domain, and a CH3 domain.

[0207] The Fc region of an Ig constant region, depending on the Ig isotype can include the CH2, CH3, and CH4 domains, as well as the hinge region. Chimeric proteins comprising an Fc region of an Ig bestow several desirable properties on a chimeric protein including increased stability, increased serum half-life (see Capon et al., 1989, Nature 337:525) as well as binding to Fc receptors such as the neonatal Fc receptor (FcRn) (U.S. Pat. Nos. 6,086,875, 6,485,726, 6,030,613; WO 03/077834; US2003-0235536A1), which are incorporated herein by reference in their entireties.

[0208] An Ig constant region or a portion thereof can be an FcRn binding partner. FcRn is active in adult epithelial tissues and expressed in the lumen of the intestines, pulmonary airways, nasal surfaces, vaginal surfaces, colon and rectal surfaces (U.S. Pat. No. 6,485,726). An FcRn binding partner is a portion of an Ig that binds to FcRn.

[0209] The FcRn receptor has been isolated from several mammalian species including humans. The sequences of the human FcRn, monkey FcRn, rat FcRn, and mouse FcRn are known (Story et al. 1994, J. Exp. Med. 180:2377). The FcRn receptor binds IgG (but not other Ig classes such as IgA, IgM, IgD, and IgE) at relatively low pH, actively transports the IgG transcellularly in a luminal to serosal direction, and then releases the IgG at relatively higher pH found in the interstitial fluids. It is expressed in adult epithelial tissue (U.S. Pat. Nos. 6,485,726, 6,030,613, 6,086,875; WO 03/077834; US2003-0235536A1) including lung and intestinal epithelium (Israel et al. 1997, Immunology 92:69) renal proximal tubular epithelium (Kobayashi et al. 2002, Am. J. Physiol. Renal Physiol. 282:F358) as well as nasal epithelium, vaginal surfaces, and biliary tree surfaces.

[0210] FcRn binding partners useful in the present invention encompass molecules that can be specifically bound by the FcRn receptor including whole IgG, the Fc fragment of IgG, and other fragments that include the complete binding region of the FcRn receptor. The region of the Fc portion of IgG that binds to the FcRn receptor has been described based on X-ray crystallography (Burmeister et al. 1994, Nature 372:379). The major contact area of the Fc with the FcRn is near the junction of the CH2 and CH3 domains. Fc-FcRn contacts are all within a single Ig heavy chain. The FcRn binding partners include whole IgG, the Fc fragment of IgG, and other fragments of IgG that include the complete binding region of FcRn. The major contact sites include amino acid residues 248, 250-257, 272, 285, 288, 290-291, 308-311, and 314 of the CH2 domain and amino acid residues 385-387, 428, and 433-436 of the CH3 domain. References made to amino acid numbering of Igs or Ig fragments, or regions, are all based on Kabat et al. 1991, Sequences of Proteins of Immunological Interest, U.S. Department of Public Health, Bethesda, Md.

[0211] Fc regions or FcRn binding partners bound to FcRn can be effectively shuttled across epithelial barriers by FcRn, thus providing a non-invasive means to systemically administer a desired therapeutic molecule. Additionally, fusion proteins comprising an Fc region or an FcRn binding partner are endocytosed by cells expressing the FcRn. But instead of being marked for degradation, these fusion proteins are recycled out into circulation again, thus increasing the in vivo half-life of these proteins. In certain embodiments, the portions of Ig constant regions are an Fc region or an FcRn binding partner that typically associates, via disulfide bonds and other non-specific interactions, with another Fc region or another FcRn binding partner to form dimers and higher order multimers.

[0212] Two FcRn receptors can bind a single Fc molecule. Crystallographic data suggest that each FcRn molecule binds a single polypeptide of the Fc homodimer. In one embodiment, linking the FcRn binding partner, e.g., an Fc fragment of an IgG, to a biologically active molecule provides a means of delivering the biologically active molecule orally, buccally, sublingually, rectally, vaginally, as an aerosol administered nasally or via a pulmonary route, or via an ocular route. In another embodiment, the chimeric protein can be administered invasively, e.g., subcutaneously, intravenously.

[0213] An FcRn binding partner region is a molecule or a portion thereof that can be specifically bound by the FcRn receptor with consequent active transport by the FcRn receptor of the Fc region. Specifically bound refers to two molecules forming a complex that is relatively stable under physiologic conditions. Specific binding is characterized by a high affinity and a low to moderate capacity as distinguished from nonspecific binding which usually has a low affinity with a moderate to high capacity. Typically, binding is considered specific when the affinity constant KA is higher than 10⁶ M⁻¹, or higher than 10⁸ M⁻¹. If necessary, non-specific binding can be reduced without substantially affecting specific binding by varying the binding conditions. The appropriate binding conditions such as concentration of the molecules, ionic strength of the solution, temperature, time allowed for binding, concentration of a blocking agent (e.g. serum albumin, milk casein), etc., may be optimized by a skilled artisan using routine techniques.

[0214] In certain embodiments, a chimeric protein of the invention comprises one or more truncated Fc regions that are nonetheless sufficient to confer Fc receptor (FcR) binding properties to the Fc region. For example, the portion of an Fc region that binds to FcRn (i.e., the FcRn binding portion) comprises from about amino acids 282-438 of IgG1, EU numbering (with the primary contact sites being amino acids 248, 250-257, 272, 285, 288, 290-291, 308-311, and 314 of the CH2 domain and amino acid residues 385-387, 428, and 433-436 of the CH3 domain. Thus, an Fc region of the invention may comprise or consist of an FcRn binding portion. FcRn binding portions may be derived from heavy chains of any isotype, including IgG1, IgG2, IgG3 and IgG4. In one embodiment, an FcRn binding portion from an antibody of the human isotype IgG1 is used. In another embodiment, an FcRn binding portion from an antibody of the human isotype IgG4 is used.

[0215] In another embodiment, the “Fc region” includes an amino acid sequence of an Fc domain or derived from an Fc domain. In certain embodiments, an Fc region comprises at least one of: a hinge (e.g., upper, middle, and/or lower hinge region) domain (about amino acids 216-230 of an antibody Fc region according to EU numbering), a CH2 domain (about amino acids 231-340 of an antibody Fc region according to EU numbering), a CH3 domain (about amino acids 341-438 of an antibody Fc region according to EU numbering), a CH4 domain, or a variant, portion, or fragment thereof. In other embodiments, an Fc region comprises a complete Fc domain (i.e., a hinge domain, a CH2 domain, and a CH3 domain). In some embodiments, an Fc region comprises, consists essentially of, or consists of a hinge domain (or a portion thereof) fused to a CH3 domain (or a portion thereof), a hinge domain (or a portion thereof) fused to a CH2 domain (or a portion thereof), a CH2 domain (or a portion thereof) fused to a CH3 domain (or a portion thereof), a CH2 domain (or a portion thereof) fused to both a hinge domain (or a portion thereof) and a CH3 domain (or a portion thereof). In still other embodiments, an Fc region lacks at least a portion of a CH2 domain (e.g., all or part of a CH2 domain). In a particular embodiment, an Fc region comprises or consists of amino acids corresponding to EU numbers 221 to 447.

[0216] The Fc regions denoted as F, F1, or F2 herein may be obtained from a number of different sources. In one embodiment, an Fc region of the polypeptide is derived from a human Ig. It is understood, however, that an Fc region may be derived from an Ig of another mammalian species, including for example, a rodent (e.g. a mouse, rat, rabbit, or guinea pig) or non-human primate (e.g. chimpanzee, macaque) species. Moreover, the polypeptide of the Fc domains or portions thereof may be derived from any Ig class, including IgM, IgG, IgD, IgA and IgE, and any Ig isotype, including IgG1, IgG2, IgG3 and IgG4. In another embodiment, the human isotype IgG1 is used.

[0217] In certain embodiments, the Fc variant confers a change in at least one effector function imparted by an Fc region comprising said wild-type Fc domain (e.g., an improvement or reduction in the ability of the Fc region to bind to Fc receptors (e.g. FcγRI, FcγRII, or FcγRIII) or complement proteins (e.g. C1q), or to trigger antibody-dependent cytotoxicity (ADCC), phagocytosis, or complement-dependent cytotoxicity (CDCC)). In other embodiments, the Fc variant provides an engineered cysteine residue.

[0218] The Fc regions of the invention may employ art-recognized Fc variants which are known to impart a change (e.g., an enhancement or reduction) in effector function and/or FcR or FcRn binding. Specifically, a binding molecule of the invention may include, for example, a change (e.g., a substitution) at one or more of the amino acid positions disclosed in International PCT Publications WO88/07089A1, WO96/14339A1, WO98/05787A1, WO98/23289A1, WO99/51642A1, WO99/58572A1, WO00/09560A2, WO00/32767A1, WO00/42072A2, WO02/44215A2, WO02/060919A2, WO03/074569A2, WO04/016750A2, WO04/029207A2, WO04/035752A2, WO04/063351A2, WO04/074455A2, WO04/099249A2, WO05/040217A2, WO04/044859, WO05/070963A1, WO05/077981A2, WO05/092925A2, WO05/123780A2, WO06/019447A1, WO06/047350A2, and WO06/085967A2; US Patent Publication Nos. US2007/0231329, US2007/0231329, US2007/0237765, US2007/0237766, US2007/0237767, US2007/0243188, US20070248603, US20070286859, US20080057056; or U.S. Pat. Nos. 5,648,260; 5,739,277; 5,834,250; 5,869,046; 6,096,871; 6,121,022; 6,194,551; 6,242,195; 6,277,375; 6,528,624; 6,538,124; 6,737,056; 6,821,505; 6,998,253; 7,083,784; 7,404,956, and 7,317,091, each of which is incorporated by reference herein. In one embodiment, the specific change (e.g., the specific substitution of one or more amino acids disclosed in the art) may be made at one or more of the disclosed amino acid positions. In another embodiment, a different change at one or more of the disclosed amino acid positions (e.g., the different substitution of one or more amino acid position disclosed in the art) may be made.

[0219] The Fc region or FcRn binding partner of IgG can be modified according to well recognized procedures such as site directed mutagenesis and the like to yield modified IgG or Fc fragments or portions thereof that will be bound by FcRn. Such modifications include modifications remote from the FcRn contact sites as well as modifications within the contact sites that preserve or even enhance binding to the FcRn. For example, the following single amino acid residues in human IgG1 Fc (Fc yl) can be substituted without significant loss of Fc binding affinity for FcRn: P238A, S239A, K246A, K248A, D249A, M252A, T256A, E258A, T260A, D265A, S267A, H268A, E269A, D270A, E272A, L274A, N276A, Y278A, D280A, V282A, E283A, H285A, N286A, T289A, K290A, R292A, E293A, E294A, Q295A, Y296F, N297A, S298A, Y300F, R301A, V303A, V305A, T307A, L309A, Q311A, D312A, N315A, K317A, E318A, K320A, K322A, S324A, K326A, A327Q, P329A, A330Q, P331A, E333A, K334A, T335A, S337A, K338A, K340A, Q342A, R344A, E345A, Q347A, R355A, E356A, M358A, T359A, K360A, N361A, Q362A, Y373A, S375A, D376A, A378Q, E380A, E382A, S383A, N384A, Q386A, E388A, N389A, N390A, Y391F, K392A, L398A, S400A, D401A, D413A, K414A, R416A, Q418A, Q419A, N421A, V422A, S424A, E430A, N434A, T437A, Q438A, K439A, S440A, S444A, and K447A, where for example P238A represents wild type proline substituted by alanine at position number 238. As an example, a specific embodiment incorporates the N297A mutation, removing a highly conserved N-glycosylation site. In addition to alanine other amino acids may be substituted for the wild type amino acids at the positions specified above. Mutations may be introduced singly into Fc giving rise to more than one hundred Fc regions distinct from the native Fc. Additionally, combinations of two, three, or more of these individual mutations may be introduced together, giving rise to hundreds more Fc regions. Moreover, one of the Fc region of a construct of the invention may be mutated and the other Fc region of the construct not mutated at all, or they both may be mutated but with different mutations.

[0220] Certain of the above mutations may confer new functionality upon the Fc region or FcRn binding partner. For example, one embodiment incorporates N297A, removing a highly conserved N-glycosylation site. The effect of this mutation is to reduce immunogenicity, thereby enhancing circulating half-life of the Fc region, and to render the Fc region incapable of binding to FcγRI, FcγRIIA, FcγRIIB, and FcγRIIIA, without compromising affinity for FcRn (Routledge et al. 1995, Transplantation 60:847; Friend et al. 1999, Transplantation 68:1632; Shields et al. 1995, J. Biol. Chem. 276:6591). As a further example of new functionality arising from mutations described above affinity for FcRn may be increased beyond that of wild type in some instances. This increased affinity may reflect an increased “on” rate, a decreased “off” rate or both an increased “on” rate and a decreased “off” rate. Examples of mutations believed to impart an increased affinity for FcRn include, but not limited to, T256A, T307A, E380A, and N434A (Shields et al. 2001, J. Biol. Chem. 276:6591).

[0221] Additionally, at least three human Fc gamma receptors appear to recognize a binding site on IgG within the lower hinge region, generally amino acids 234-237. Therefore, another example of new functionality and potential decreased immunogenicity may arise from mutations of this region, as for example by replacing amino acids 233-236 of human IgG1 “ELLG” to the corresponding sequence from IgG2 “PVA” (with one amino acid deletion). It has been shown that FcγRI, FcγRII, and FcγRIII, which mediate various effector functions will not bind to IgG1 when such mutations have been introduced. Ward and Ghetie 1995, Therapeutic Immunology 2:77 and Armour et al. 1999, Eur. J. Immunol 29:2613.

[0222] In one embodiment, the Ig constant region or a portion thereof, e.g., an Fc region, is a polypeptide including the sequence (SEQ ID NO: 89 or SEQ ID NO: 3 of U.S. Pat. No. 5,739,277) and optionally further including a sequence selected from HQSLGTQ (SEQ ID NO: 90), HQNLSDGK (SEQ ID NO: 91), HQNISDGK (SEQ ID NO: 92), or VISSHLGQ (SEQ ID NO: 93) (or SEQ ID NOs: 11, 1, 2, and 31, respectively of U.S. Pat. No. 5,739,277).

[0223] In another embodiment, the immunoglobulin constant region or a portion thereof comprises an amino acid sequence in the hinge region or a portion thereof that forms one or more disulfide bonds with another immunoglobulin constant region or a portion thereof. The disulfide bond by the immunoglobulin constant region or a portion thereof places the first polypeptide comprising FVIII and the second polypeptide comprising the VWF fragment together so that endogenous VWF does not replace the VWF fragment and does not bind to the FVIII. Therefore, the disulfide bond between the first immunoglobulin constant region or a portion thereof and a second immunoglobulin constant region or a portion thereof prevents interaction between endogenous VWF and the FVIII protein. This inhibition of interaction between the VWF and the FVIII protein allows the half-life of the chimeric protein to go beyond the two fold limit. The hinge region or a portion thereof can further be linked to one or more domains of CH1, CH2, CH3, a fragment thereof, and any combinations thereof. In a particular embodiment, the immunoglobulin constant region or a portion thereof is a hinge region and CH2.

[0224] In certain embodiments, the Ig constant region or a portion thereof is hemi-glycosylated. For example, the chimeric protein comprising two Fc regions or FcRn binding partners may contain a first, glycosylated, Fc region (e.g., a glycosylated CH2 region) or FcRn binding partner and a second, aglycosylated, Fc region (e.g., an aglycosylated CH2 region) or FcRn binding partner. In one embodiment, a linker may be interposed between the glycosylated and aglycosylated Fc regions. In another embodiment, the Fc region or FcRn binding partner is fully glycosylated, i.e., all of the Fc regions are glycosylated. In other embodiments, the Fc region may be aglycosylated, i.e., none of the Fc moieties are glycosylated.

[0225] In certain embodiments, a chimeric protein of the invention comprises an amino acid substitution to an Ig constant region or a portion thereof (e.g., Fc variants), which alters the antigen-independent effector functions of the Ig constant region, in particular the circulating half-life of the protein.

[0226] Such proteins exhibit either increased or decreased binding to FcRn when compared to proteins lacking these substitutions and, therefore, have an increased or decreased half-life in serum, respectively. Fc variants with improved affinity for FcRn are anticipated to have longer serum half-lives, and such molecules have useful applications in methods of treating mammals where long half-life of the administered polypeptide is desired, e.g., to treat a chronic disease or disorder (see, e.g., U.S. Pat. Nos. 7,348,004, 7,404,956, and 7,862,820). In contrast, Fc variants with decreased FcRn binding affinity are expected to have shorter half-lives, and such molecules are also useful, for example, for administration to a mammal where a shortened circulation time may be advantageous, e.g. for in vivo diagnostic imaging or in situations where the starting polypeptide has toxic side effects when present in the circulation for prolonged periods. Fc variants with decreased FcRn binding affinity are also less likely to cross the placenta and, thus, are also useful in the treatment of diseases or disorders in pregnant women. In addition, other applications in which reduced FcRn binding affinity may be desired include those applications in which localization the brain, kidney, and/or liver is desired. In one exemplary embodiment, the chimeric protein of the invention exhibit reduced transport across the epithelium of kidney glomeruli from the vasculature. In another embodiment, the chimeric protein of the invention exhibit reduced transport across the blood brain barrier (BBB) from the brain, into the vascular space. In one embodiment, a protein with altered FcRn binding comprises at least one Fc region or FcRn binding partner (e.g., one or two Fc regions or FcRn binding partners) having one or more amino acid substitutions within the “FcRn binding loop” of an Ig constant region. The FcRn binding loop is comprised of amino acid residues 280-299 (according to EU numbering) of a wild-type, full-length, Fc region. In other embodiments, an Ig constant region or a portion thereof in a chimeric protein of the invention having altered FcRn binding affinity comprises at least one Fc region or FcRn binding partner having one or more amino acid substitutions within the 15 \acute{Å} FcRn “contact zone.” As used herein, the term 15 \acute{Å} FcRn “contact zone” includes residues at the following positions of a wild-type, full-length Fc moiety: 243-261, 275-280, 282-293, 302-319, 336-348, 367, 369, 372-389, 391, 393, 408, 424, 425-440 (EU numbering). In other embodiments, a Ig constant region or a portion thereof of the invention having altered FcRn binding affinity comprises at least one Fc region or FcRn binding partner having one or more amino acid substitutions at an amino acid position corresponding to any one of the following EU positions: 256, 277-281, 283-288, 303-309, 313, 338, 342, 376, 381, 384, 385, 387, 434 (e.g., N434A or N434K), and 438. Exemplary amino acid substitutions which altered FcRn binding activity are disclosed in International PCT Publication No. WO05/047327 which is incorporated by reference herein.

[0227] An Fc region or FcRn binding partner used in the invention may also comprise an art recognized amino acid substitution which alters the glycosylation of the chimeric protein. For example, the Fc region or FcRn binding partner of the chimeric protein linked to a VWF fragment or a FVIII protein may comprise an Fc region having a mutation leading to reduced glycosylation (e.g., N- or O-linked glycosylation) or may comprise an altered glycoform of the wild-type Fc moiety (e.g., a low fucose or fucose-free glycan).

[0228] In one embodiment, an unprocessed chimeric protein of the invention may comprise a genetically fused Fc region (i.e., scFc region) having two or more of its constituent Ig constant region or a portion thereof independently selected from the Ig constant region or a portion thereof described herein. In one embodiment, the Fc regions of a dimeric Fc region are the same. In another embodiment, at least two of the Fc regions are different. For example, the Fc regions or FcRn binding partners of the proteins of the invention comprise the same number of amino acid residues or they may differ in length by one or more amino acid residues (e.g., by about 5 amino acid residues (e.g., 1, 2, 3, 4, or 5 amino acid residues), about 10 residues, about 15 residues, about 20 residues, about 30 residues, about 40 residues, or about 50 residues). In yet other embodiments, the Fc regions or FcRn binding partners of the protein of the invention may differ in sequence at one or more amino acid positions. For example, at least two of the Fc regions or FcRn binding partners may differ at about 5 amino acid positions (e.g., 1, 2, 3, 4, or 5 amino acid positions), about 10 positions, about 15 positions, about 20 positions, about 30 positions, about 40 positions, or about 50 positions).

### II.E. Linkers

[0229] The chimeric protein of the present invention further comprises one or more linkers. One type of the linkers is a cleavable linker, which can be cleaved by various proteases when administered to a subject in vivo, e.g., at a site of coagulation. In one embodiment, the cleavable linker allows cleavage of moiety, e.g., a VWF protein, from the XTEN sequence, thus from the chimeric protein at the site of the coagulation cascade, thereby allowing activated FVIII (FVIIIa) to have its FVIIIa activity. Another type of the linkers is a processable linker, which contains an intracellular cleavage site and thus can be cleaved by an intracellular processing enzyme in a host cell, allowing convenient expression of a polypeptide and formation of a chimeric protein.

[0230] One or more linkers can be present between any two proteins in the chimeric protein. In one embodiment, a chimeric protein comprises a first polypeptide which comprises (i) a FVIII protein and (ii) a first Ig constant region or a portion thereof and a second polypeptide which comprises (iii) a VWF protein, (iv) a linker (e.g., a cleavable linker), (v) an XTEN sequence, and (vi) a second Ig constant region or a portion thereof. In another embodiment, a chimeric protein comprises a first polypeptide which comprises (i) a FVIII protein and (ii) a first Ig constant region or a portion thereof and a second polypeptide which comprises (iii) a VWF protein, (iv) an XTEN sequence, (v) a linker (e.g., a cleavable linker), and (vi) a second Ig constant region or a portion thereof. In other embodiments, a chimeric protein comprises a first polypeptide which comprises (i) a FVIII protein and (ii) a first Ig constant region or a portion thereof and a second polypeptide which comprises (iii) a VWF protein, (iv) a first linker (e.g., a cleavable linker), (v) an XTEN sequence, (vi) a second linker (e.g., a cleavable linker), and (vii) a second Ig constant region or a portion thereof. In some embodiments, the first polypeptide further comprises a linker, e.g., a cleavable linker between the FVIII protein and the first Ig constant region.

[0231] In certain embodiments, a chimeric protein comprises a single chain comprising (i) a FVIII protein, (ii) a first Ig constant region or a portion thereof, (iii) a linker (e.g., a processable linker), (iv) a VWF protein, (v) an XTEN sequence, and (vi) a second Ig constant region or a portion thereof. In other embodiments, a chimeric protein comprises a single chain comprising (i) a FVIII protein, (ii) a first Ig constant region or a portion thereof, (iii) a first linker (e.g., a processable linker), (iv) a VWF protein, (v) a second linker (e.g., a cleavable linker), (vi) an XTEN sequence, and (vii) a second Ig constant region or a portion thereof. The processable linker can be processed after the chimeric protein is expressed in the host cell; thus the chimeric protein produced in the host cell can be in the final form comprising two or three polypeptide chains.

[0232] The linker useful in the present invention can comprise any organic molecule. In one embodiment, the linker comprises a polymer, e.g., polyethylene glycol (PEG) or hydroxyethyl starch (HES). In another embodiment, the linker comprises an amino acids sequence. The linker can comprise at least about 10, 20, 30, 40, 50, 60, 70, 80, 90, 100, 150, 200, 300, 400, 500, 600, 700, 800, 900, 1000, 1100, 1200, 1300, 1400, 1500, 1600, 1700, 1800, 1900, or 2000 amino acids. The linker can comprise 1-5 amino acids, 1-10 amino acids, 1-20 amino acids, 10-50 amino acids, 50-100 amino acids, 100-200 amino acids, 200-300 amino acids, 300-400 amino acids, 400-500 amino acids, 500-600 amino acids, 600-700 amino acids, 700-800 amino acids, 800-900 amino acids, or 900-1000 amino acids. In one embodiment, the linker comprises an XTEN sequence. Additional examples of XTEN can be used according to the present invention and are disclosed in US Patent Publication Nos. 2010/0239554 A1, 2010/0323956 A1, 2011/0046060 A1, 2011/0046061 A1, 2011/0077199 A1, or 2011/0172146 A1, or International Patent Publication Nos. WO 2010091122 A1, WO 2010144502 A2, WO 2010144508 A1, WO 2011028228 A1, WO 2011028229 A1, or WO 2011028344 A2. In another embodiment, the linker is a PAS sequence.

[0233] In one embodiment, the linker is a polymer, e.g., polyethylene glycol (PEG) or hydroxyethyl starch (HES). In another embodiment, the linker is an amino acid sequence. The linker can comprise at least about 10, 20, 30, 40, 50, 60, 70, 80, 90, 100, 150, 200, 300, 400, 500, 600, 700, 800, 900, 1000, 1100, 1200, 1300, 1400, 1500, 1600, 1700, 1800, 1900, or 2000 amino acids. The linker can comprise 1-5 amino acids, 1-10 amino acids, 1-20 amino acids, 10-50 amino acids, 50-100 amino acids, 100-200 amino acids, 200-300 amino acids, 300-400 amino acids, 400-500 amino acids, 500-600 amino acids, 600-700 amino acids, 700-800 amino acids, 800-900 amino acids, or 900-1000 amino acids.

[0234] Examples of linkers are well known in the art. In one embodiment, the linker comprises the sequence G. The linker can comprise the sequence (GA)ₙ. The linker can comprise the sequence (GGS)ₙ. In other embodiments, the linker comprises (GGGS)ₙ (SEQ ID NO: 101). In still other embodiments, the linker comprises the sequence (GGS)ₙ(GGGGS)ₙ (SEQ ID NO: 95). In these instances, n may be an integer from 1-100. In other instances, n may be an integer from 1-20, i.e., 1, 2, 3, 4, 5, 6, 7, 8, 9, 10, 11, 12, 13, 14, 15, 16, 17, 18, 19, or 20. Examples of linkers include, but are not limited to, GGG, SGGSGGS (SEQ ID NO: 96), GGSGGSGGSGGSGGG (SEQ ID NO: 97), GGSGGSGGGGSGGGGS (SEQ ID NO: 98), GGSGGSGGSGGSGGSGGS (SEQ ID NO: 99), or GGGGSGGGGSGGGGS (SEQ ID NO: 100). The linker does not eliminate or diminish the VWF protein activity or the clotting activity of Factor VIII. Optionally, the linker enhances the VWF protein activity or the clotting activity of Factor VIII protein, e.g., by further diminishing the effects of steric hindrance and making the VWF protein or Factor VIII portion more accessible to its target binding site.

[0235] In one embodiment, the linker useful for the chimeric protein is 15-25 amino acids long. In another embodiment, the linker useful for the chimeric protein is 15-20 amino acids long. In some embodiments, the linker for the chimeric protein is 10-25 amino acids long. In other embodiments, the linker for the chimeric protein is 15 amino acids long. In still other embodiments, the linker for the chimeric protein is (GGGGS)ₙ (SEQ ID NO: 94) where G represents glycine, S represents serine and n is an integer from 1-20.

### II. F. Cleavage Sites

[0236] A cleavable linkers can incorporate a moiety capable of being cleaved either chemically (e.g., hydrolysis of an ester bond), enzymatically (i.e., incorporation of a protease cleavage sequence), or photolytically (e.g., a chromophore such as 3-amino-3-(2-nitrophenyl) proprionic acid (ANP)) in order to release one molecule from another.

[0237] In one embodiment, a cleavable linker comprises one or more cleavage sites at the N-terminus or C-terminus or both. In another embodiment, the cleavable linker consists essentially of or consists of one or more cleavable sites. In other embodiments, the cleavable linker comprises heterologous amino acid linker sequences described herein or polymers and one or more cleavable sites.

[0238] In certain embodiments, a cleavable linker comprises one or more cleavage sites that can be cleaved in a host cell (i.e., intracellular processing sites). Non limiting examples of the cleavage site include RRRR (SEQ ID NO: 102), RKRRKR (SEQ ID NO: 103), and RRRRS (SEQ ID NO: 104).

[0239] In some embodiments, a cleavable linker comprises an a1 region from FVIII, an a2 region from FVIII, an a3 region from FVIII, a thrombin cleavable site which comprises X—V-P-R (SEQ ID NO: 105) and a PAR1 exosite interaction motif, wherein X is an aliphatic amino acid, or any combinations thereof. comprises the a2 region which comprises an amino acid sequence at least about 80%, about 85%, about 90%, about 95%, or 100% identical to Glu720 to Arg740 corresponding to full-length FVIII, wherein the a2 region is capable of being cleaved by thrombin. In a particular embodiment, a cleavable linker useful for the invention comprises an a2 region which comprises ISDKNTGDYYEDSYEDISAYLLSKNNAIEPRSFS (SEQ ID NO: 106). In other embodiments, a cleavable linker for the invention comprises the a1 region which comprises an amino acid sequence at least about 80%, about 85%, about 90%, about 95%, or 100% identical to Met337 to Arg372 corresponding to full-length FVIII, wherein the a1 region is capable of being cleaved by thrombin. In a particular embodiment, the a1 region comprises ISMKNNEEAEDYDDDLTDSEMDVVRFDDDNSPSFIQIRSV (SEQ ID NO: 107). In some embodiments, a cleavable linker of the invention comprises the a3 region which comprises an amino acid sequence at least about 80%, about 85%, about 90%, about 95%, or 100% identical to Glu1649 to Arg1689 corresponding to full-length FVIII, wherein the a3 region is capable of being cleaved by thrombin. In a specific embodiment, a cleavable linker for the invention comprises an a3 region comprises ISEITRTTLQSDQEEIDYDDTISVEMKKEDFDIYDEDENQSPRSFQ (SEQ ID NO: 108).

[0240] In other embodiments, a cleavable linker comprises the thrombin cleavage site which comprises X-V-P-R (SEQ ID NO: 105) and the PAR1 exosite interaction motif and wherein the PAR1 exosite interaction motif comprises S-F-L-L-R-N (SEQ ID NO: 109). The PAR1 exosite interaction motif can further comprise an amino acid sequence selected from P, P-N, P-N-D, P-N-D-K (SEQ ID NO: 110), P-N-D-K-Y (SEQ ID NO: 111), P-N-D-K-Y-E (SEQ ID NO: 112), P-N-D-K-Y-E-P (SEQ ID NO: 113), P-N-D-K-Y-E-P-F (SEQ ID NO: 114), P-N-D-K-Y-E-P-F-W (SEQ ID NO: 115), P-N-D-K-Y-E-P-F-W-E (SEQ ID NO: 116), P-N-D-K-Y-E-P-F-W-E-D (SEQ ID NO: 117), P-N-D-K-Y-E-P-F-W-E-D-E (SEQ ID NO: 118), P-N-D-K-Y-E-P-F-W-E-D-E-E (SEQ ID NO: 119), P-N-D-K-Y-E-P-F-W-E-D-E-E-S(SEQ ID NO: 120), or any combination thereof. In some embodiments, the aliphatic amino acid is selected from Glycine, Alanine, Valine, Leucine, or Isoleucine.

[0241] In other embodiments, a cleavable linker comprises one or more cleavage sites that are cleaved by a protease after a chimeric protein comprising the cleavable linker is administered to a subject. In one embodiment, the cleavage site is cleaved by a protease selected from the group consisting of factor XIa, factor XIIa, kallikrein, factor VIIa, factor IXa, factor Xa, factor IIa (thrombin), Elastase-2, MMP-12, MMP-13, MMP-17, and MMP-20. In another embodiment, the cleavage site is selected from the group consisting of a FXIa cleavage site (e.g., KLTR↓AET (SEQ ID NO: 121)), a FXIa cleavage site (e.g., DFTR↓VVG (SEQ ID NO: 122)), a FXIIa cleavage site (e.g., TMTR↓IVGG (SEQ ID NO: 123)), a Kallikrein cleavage site (e.g., SPFR↓STGG (SEQ ID NO: 124)), a FVIIa cleavage site (e.g., LQVR↓IVGG (SEQ ID NO: 125)), a FIXa cleavage site (e.g., PLGR↓IVGG (SEQ ID NO: 126)), a FXa cleavage site (e.g., IEGR↓TVGG (SEQ ID NO: 127)), a FIIa (thrombin) cleavage site (e.g., LTPR↓SLLV (SEQ ID NO: 128)), a Elastase-2 cleavage site (e.g., LGPV↓SGVP (SEQ ID NO: 129)), a Granzyme-B cleavage (e.g., VAGD↓SLEE (SEQ ID NO: 130)), a MMP-12 cleavage site (e.g., GPAG↓LGGA (SEQ ID NO: 131)), a MMP-13 cleavage site (e.g., GPAG↓LRGA (SEQ ID NO: 132)), a MMP-17 cleavage site (e.g., APLG↓LRLR (SEQ ID NO: 133)), a MMP-20 cleavage site (e.g., PALP↓LVAQ (SEQ ID NO: 134)), a TEV cleavage site (e.g., ENLYFQ↓G (SEQ ID NO: 135)), a Enterokinase cleavage site (e.g., DDDK↓IVGG (SEQ ID NO: 136)), a Protease 3C (PRESCISSION™) cleavage site (e.g., LEVLFQ↓IVGP (SEQ ID NO: 137)), and a Sortase A cleavage site (e.g., LPKT↓GSES) (SEQ ID NO: 138). In certain embodiments, the FXIa cleavage sites include, but are not limited to, e.g., TQSFNDFTR (SEQ ID NO: 1) and SVSQTSKLTR (SEQ ID NO: 3). Non-limiting exemplary thrombin cleavage sites include, e.g., DFLAEGGGVR (SEQ ID NO: 4), TTKIKPR (SEQ ID NO: 5), LVPRG (SEQ ID NO: 6), DKNTGDYYEDSYEDISAYLLSKNNAIEPRSFS (SEQ ID NO: 88), or IEPRSFS (SEQ ID NO: 194), and a sequence comprising, consisting essentially of, or consisting of ALRPR (SEQ ID NO: 7) (e.g., ALRPRVVGGA (SEQ ID NO: 145)).

[0242] In a specific embodiment, the cleavage site is TLDPRSFLLRNPNDKYEPFWEDEEK (SEQ ID NO: 146). In another embodiment, the cleavage site comprises DKNTGDYYEDSYEDISAYLLSKNNAIEPRSFS (SEQ ID NO: 88) or a fragment thereof. In one particular embodiment, the cleavage site comprises IEPRSFS (SEQ ID NO: 194). In another embodiment, the cleavage site comprises EPRSFS (SEQ ID NO: 195), wherein the cleavage site is not the full-length a2 region of FVIII. In still another embodiment, the cleavage site comprises IEPR (SEQ ID NO: 200). In another embodiment, the cleavage site comprises IEPR (SEQ ID NO: 200), wherein the cleavage site is not the full-length a2 region of FVIII or does not comprise the full-length a2 region of FVIII. In other embodiments, the cleavage site comprises DKNTGDYYEDSYEDISAYLLSKNNAIEPRSFS (SEQ ID NO: 88), KNTGDYYEDSYEDISAYLLSKNNAIEPRSFS (SEQ ID NO: 139), NTGDYYEDSYEDISAYLLSKNNAIEPRSFS (SEQ ID NO: 140), TGDYYEDSYEDISAYLLSKNNAIEPRSFS (SEQ ID NO: 141), GDYYEDSYEDISAYLLSKNNAIEPRSFS (SEQ ID NO: 142), DYYEDSYEDISAYLLSKNNAIEPRSFS (SEQ ID NO: 143), YYEDSYEDISAYLLSKNNAIEPRSFS (SEQ ID NO: 144), YEDSYEDISAYLLSKNNAIEPRSFS (SEQ ID NO: 176), EDSYEDISAYLLSKNNAIEPRSFS (SEQ ID NO: 177), DSYEDISAYLLSKNNAIEPRSFS (SEQ ID NO: 178), SYEDISAYLLSKNNAIEPRSFS (SEQ ID NO: 179), YEDISAYLLSKNNAIEPRSFS (SEQ ID NO: 180), EDISAYLLSKNNAIEPRSFS (SEQ ID NO: 181), DISAYLLSKNNAIEPRSFS (SEQ ID NO: 182), ISAYLLSKNNAIEPRSFS (SEQ ID NO: 183), SAYLLSKNNAIEPRSFS (SEQ ID NO: 184), AYLLSKNNAIEPRSFS (SEQ ID NO: 185), YLLSKNNAIEPRSFS (SEQ ID NO: 186), LLSKNNAIEPRSFS (SEQ ID NO: 187), LSKNNAIEPRSFS (SEQ ID NO: 188), SKNNAIEPRSFS (SEQ ID NO: 189), KNNAIEPRSFS (SEQ ID NO: 190), NNAIEPRSFS (SEQ ID NO: 191), NAIEPRSFS (SEQ ID NO: 192), AIEPRSFS (SEQ ID NO: 193), or IEPRSFS (SEQ ID NO: 194). In other embodiments, the cleavage site comprises DKNTGDYYEDSYEDISAYLLSKNNAIEPRSFS (SEQ ID NO: 88), KNTGDYYEDSYEDISAYLLSKNNAIEPRSFS (SEQ ID NO: 139), NTGDYYEDSYEDISAYLLSKNNAIEPRSFS (SEQ ID NO: 140), TGDYYEDSYEDISAYLLSKNNAIEPRSFS (SEQ ID NO: 141), GDYYEDSYEDISAYLLSKNNAIEPRSFS (SEQ ID NO: 142), DYYEDSYEDISAYLLSKNNAIEPRSFS (SEQ ID NO: 143), YYEDSYEDISAYLLSKNNAIEPRSFS (SEQ ID NO: 144), YEDSYEDISAYLLSKNNAIEPRSFS (SEQ ID NO: 176), EDSYEDISAYLLSKNNAIEPRSFS (SEQ ID NO: 177), DSYEDISAYLLSKNNAIEPRSFS (SEQ ID NO: 178), SYEDISAYLLSKNNAIEPRSFS (SEQ ID NO: 179), YEDISAYLLSKNNAIEPRSFS (SEQ ID NO: 180), EDISAYLLSKNNAIEPRSFS (SEQ ID NO: 181), DISAYLLSKNNAIEPRSFS (SEQ ID NO: 182), ISAYLLSKNNAIEPRSFS (SEQ ID NO: 183), SAYLLSKNNAIEPRSFS (SEQ ID NO: 184), AYLLSKNNAIEPRSFS (SEQ ID NO: 185), YLLSKNNAIEPRSFS (SEQ ID NO: 186), LLSKNNAIEPRSFS (SEQ ID NO: 187), LSKNNAIEPRSFS (SEQ ID NO: 188), SKNNAIEPRSFS (SEQ ID NO: 189), KNNAIEPRSFS (SEQ ID NO: 190), NNAIEPRSFS (SEQ ID NO: 191), NAIEPRSFS (SEQ ID NO: 192), AIEPRSFS (SEQ ID NO: 193), or IEPRSFS (SEQ ID NO:194), wherein the cleavage site is not the full-length FVIII a2 region. In certain embodiments the cleavable linker is cleavable in a thrombin cleavage assay as provided herein or as known in the art.

### III. POLYNUCLEOTIDES, VECTORS, AND HOST CELLS

[0243] Also provided in the invention is a polynucleotide encoding a chimeric protein of the invention. In one embodiment, the first polypeptide chain and the second polypeptide chain can be encoded by a single polynucleotide chain. In another embodiment, the first polypeptide chain and the second polypeptide chain are encoded by two different polynucleotides, i.e., a first nucleotide sequence and a second nucleotide sequence. In another embodiment, the first nucleotide sequence and the second nucleotide sequence are on two different polynucleotides (e.g., different vectors).

[0244] The invention includes a polynucleotide encoding a single polypeptide chain (e.g., FVIII(X2)-F1-L3-F2-L2-X1-L1-V), wherein FVIII(X2) comprises a FVIII protein in which an XTEN sequence is inserted at one or more insertion sites, F1 comprises a first Ig constant region or a portion thereof, e.g., a first Fc region, L1 comprises a first linker, V comprises a VWF protein, X1 comprises an XTEN sequence having less than 288 amino acids in length, L2 comprises a second linker, L3 comprises a third linker, and F2 comprises a second Ig constant region or a portion thereof, e.g., a second Fc region. The invention also includes two polynucleotides, a first polynucleotide sequence encoding a first polypeptide which comprises a FVIII protein fused to a first Ig constant region or a portion thereof and a second polynucleotide sequence encoding a second polypeptide which comprises a VWF protein, an XTEN sequence having less than 288 amino acids in length, and a second Ig constant region or a portion thereof. In some embodiments, a chimeric protein comprising two polypeptide chains or three polypeptide chains can be encoded by a single polynucleotide chain, and then processed into two or three (or more) polypeptide chains. In yet other embodiments, a chimeric protein comprising these polypeptide chains can be encoded by two or three polynucleotide chains.

[0245] In other embodiments, the set of the polynucleotides further comprises an additional nucleotide chain (e.g., a second nucleotide chain when the chimeric polypeptide is encoded by a single polynucleotide chain or a third nucleotide chain when the chimeric protein is encoded by two polynucleotide chains) which encodes a protein convertase. The protein convertase can be selected from the group consisting of proprotein convertase subtilisin/kexin type 5 (PCSK5 or PC5), proprotein convertase subtilisin/kexin type 7 (PCSK7 or PC5), a yeast Kex 2, proprotein convertase subtilisin/kexin type 3 (PACE or PCSK3), and two or more combinations thereof. In some embodiments, the protein convertase is PACE, PC5, or PC7. In a specific embodiment, the protein convertase is PC5 or PC7. See International Application no. PCT/US2011/043568.

[0246] As used herein, an expression vector refers to any nucleic acid construct which contains the necessary elements for the transcription and translation of an inserted coding sequence, or in the case of an RNA viral vector, the necessary elements for replication and translation, when introduced into an appropriate host cell. Expression vectors can include plasmids, phagemids, viruses, and derivatives thereof.

[0247] Expression vectors of the invention will include polynucleotides encoding the chimeric protein described herein. In one embodiment, one or more of the coding sequences for the first polypeptide comprising a FVIII protein and a first Ig constant region, the second polypeptide comprising a VWF protein, an XTEN sequence having less than 288 amino acids, and a second Ig constant region or a portion thereof, or both are operably linked to an expression control sequence. As used herein, two nucleic acid sequences are operably linked when they are covalently linked in such a way as to permit each component nucleic acid sequence to retain its functionality. A coding sequence and a gene expression control sequence are said to be operably linked when they are covalently linked in such a way as to place the expression or transcription and/or translation of the coding sequence under the influence or control of the gene expression control sequence. Two DNA sequences are said to be operably linked if induction of a promoter in the 5′ gene expression sequence results in the transcription of the coding sequence and if the nature of the linkage between the two DNA sequences does not (1) result in the introduction of a frame-shift mutation, (2) interfere with the ability of the promoter region to direct the transcription of the coding sequence, or (3) interfere with the ability of the corresponding RNA transcript to be translated into a protein. Thus, a gene expression sequence would be operably linked to a coding nucleic acid sequence if the gene expression sequence were capable of effecting transcription of that coding nucleic acid sequence such that the resulting transcript is translated into the desired protein or polypeptide.

[0248] A gene expression control sequence as used herein is any regulatory nucleotide sequence, such as a promoter sequence or promoter-enhancer combination, which facilitates the efficient transcription and translation of the coding nucleic acid to which it is operably linked. The gene expression control sequence may, for example, be a mammalian or viral promoter, such as a constitutive or inducible promoter. Constitutive mammalian promoters include, but are not limited to, the promoters for the following genes: hypoxanthine phosphoribosyl transferase (HPRT), adenosine deaminase, pyruvate kinase, beta-actin promoter, and other constitutive promoters. Exemplary viral promoters which function constitutively in eukaryotic cells include, for example, promoters from the cytomegalovirus (CMV), simian virus (e.g., SV40), papilloma virus, adenovirus, human immunodeficiency virus (HIV), Rous sarcoma virus, cytomegalovirus, the long terminal repeats (LTR) of Moloney leukemia virus, and other retroviruses, and the thymidine kinase promoter of herpes simplex virus. Other constitutive promoters are known to those of ordinary skill in the art. The promoters useful as gene expression sequences of the invention also include inducible promoters. Inducible promoters are expressed in the presence of an inducing agent. For example, the metallothionein promoter is induced to promote transcription and translation in the presence of certain metal ions. Other inducible promoters are known to those of ordinary skill in the art.

[0249] In general, the gene expression control sequence shall include, as necessary, 5′ non-transcribing and 5′ non-translating sequences involved with the initiation of transcription and translation, respectively, such as a TATA box, capping sequence, CAAT sequence, and the like. Especially, such 5′ non-transcribing sequences will include a promoter region which includes a promoter sequence for transcriptional control of the operably joined coding nucleic acid. The gene expression sequences optionally include enhancer sequences or upstream activator sequences as desired.

[0250] Viral vectors include, but are not limited to, nucleic acid sequences from the following viruses: retrovirus, such as Moloney murine leukemia virus, Harvey murine sarcoma virus, murine mammary tumor virus, and Rous sarcoma virus; adenovirus, adeno-associated virus; SV40-type viruses; polyomaviruses; Epstein-Barr viruses; papilloma viruses; herpes virus; vaccinia virus; polio virus; and RNA virus such as a retrovirus. One can readily employ other vectors well-known in the art. Certain viral vectors are based on non-cytopathic eukaryotic viruses in which non-essential genes have been replaced with the gene of interest. Non-cytopathic viruses include retroviruses, the life cycle of which involves reverse transcription of genomic viral RNA into DNA with subsequent proviral integration into host cellular DNA. Retroviruses have been approved for human gene therapy trials. Most useful are those retroviruses that are replication-deficient (i.e., capable of directing synthesis of the desired proteins, but incapable of manufacturing an infectious particle). Such genetically altered retroviral expression vectors have general utility for the high efficiency transduction of genes in vivo. Standard protocols for producing replication-deficient retroviruses (including the steps of incorporation of exogenous genetic material into a plasmid, transfection of a packaging cell line with plasmid, production of recombinant retroviruses by the packaging cell line, collection of viral particles from tissue culture media, and infection of the target cells with viral particles) are provided in Kriegler, M., Gene Transfer and Expression, A Laboratory Manual, W.H. Freeman Co., New York (1990) and Murry, E. J., Methods in Molecular Biology, Vol. 7, Humana Press, Inc., Cliffton, N.J. (1991).

[0251] In one embodiment, the virus is an adeno-associated virus, a double-stranded DNA virus. The adeno-associated virus can be engineered to be replication-deficient and is capable of infecting a wide range of cell types and species. It further has advantages such as heat and lipid solvent stability; high transduction frequencies in cells of diverse lineages, including hematopoietic cells; and lack of superinfection inhibition thus allowing multiple series of transductions. Reportedly, the adeno-associated virus can integrate into human cellular DNA in a site-specific manner, thereby minimizing the possibility of insertional mutagenesis and variability of inserted gene expression characteristic of retroviral infection. In addition, wild-type adeno-associated virus infections have been followed in tissue culture for greater than 100 passages in the absence of selective pressure, implying that the adeno-associated virus genomic integration is a relatively stable event. The adeno-associated virus can also function in an extrachromosomal fashion.

[0252] Other vectors include plasmid vectors. Plasmid vectors have been extensively described in the art and are well-known to those of skill in the art. See, e.g., Sambrook et al., Molecular Cloning: A Laboratory Manual, Second Edition, Cold Spring Harbor Laboratory Press, 1989. In the last few years, plasmid vectors have been found to be particularly advantageous for delivering genes to cells in vivo because of their inability to replicate within and integrate into a host genome. These plasmids, however, having a promoter compatible with the host cell, can express a peptide from a gene operably encoded within the plasmid. Some commonly used plasmids available from commercial suppliers include pBR322, pUC18, pUC19, various pcDNA plasmids, pRC/CMV, various pCMV plasmids, pSV40, and pBlueScript. Additional examples of specific plasmids include pcDNA3.1, catalog number V79020; pcDNA3.1/hygro, catalog number V87020; pcDNA4/myc-His, catalog number V86320; and pBudCE4.1, catalog number V53220, all from Invitrogen (Carlsbad, Calif.). Other plasmids are well-known to those of ordinary skill in the art. Additionally, plasmids may be custom designed using standard molecular biology techniques to remove and/or add specific fragments of DNA.

[0253] In one insect expression system that may be used to produce the proteins of the invention, Autographa californica nuclear polyhidrosis virus (AcNPV) is used as a vector to express the foreign genes. The virus grows in Spodoptera frugiperda cells. A coding sequence may be cloned into non-essential regions (for example, the polyhedron gene) of the virus and placed under control of an ACNPV promoter (for example, the polyhedron promoter). Successful insertion of a coding sequence will result in inactivation of the polyhedron gene and production of non-occluded recombinant virus (i.e., virus lacking the proteinaceous coat coded for by the polyhedron gene). These recombinant viruses are then used to infect Spodoptera frugiperda cells in which the inserted gene is expressed. (see, e.g., Smith et al. (1983) J Virol 46:584; U.S. Pat. No. 4,215,051). Further examples of this expression system may be found in Ausubel et al., eds. (1989) Current Protocols in Molecular Biology, Vol. 2, Greene Publish. Assoc. & Wiley Interscience.

[0254] Another system which can be used to express the proteins of the invention is the glutamine synthetase gene expression system, also referred to as the “GS expression system” (Lonza Biologics PLC, Berkshire UK). This expression system is described in detail in U.S. Pat. No. 5,981,216.

[0255] In mammalian host cells, a number of viral based expression systems may be utilized. In cases where an adenovirus is used as an expression vector, a coding sequence may be ligated to an adenovirus transcription/translation control complex, e.g., the late promoter and tripartite leader sequence. This chimeric gene may then be inserted in the adenovirus genome by in vitro or in vivo recombination. Insertion in a non-essential region of the viral genome (e.g., region E1 or E3) will result in a recombinant virus that is viable and capable of expressing peptide in infected hosts. See, e.g., Logan & Shenk (1984) Proc Natl Acad Sci USA 81:3655). Alternatively, the vaccinia 7.5 K promoter may be used. See, e.g., Mackett et al. (1982) Proc Natl Acad Sci USA 79:7415; Mackett et al. (1984) J Virol 49:857; Panicali et al. (1982) Proc Natl Acad Sci USA 79:4927.

[0256] To increase efficiency of production, the polynucleotides can be designed to encode multiple units of the protein of the invention separated by enzymatic cleavage sites. The resulting polypeptide can be cleaved (e.g., by treatment with the appropriate enzyme) in order to recover the polypeptide units. This can increase the yield of polypeptides driven by a single promoter. When used in appropriate viral expression systems, the translation of each polypeptide encoded by the mRNA is directed internally in the transcript; e.g., by an internal ribosome entry site, IRES. Thus, the polycistronic construct directs the transcription of a single, large polycistronic mRNA which, in turn, directs the translation of multiple, individual polypeptides. This approach eliminates the production and enzymatic processing of polyproteins and may significantly increase the yield of polypeptides driven by a single promoter.

[0257] Vectors used in transformation will usually contain a selectable marker used to identify transformants. In bacterial systems, this can include an antibiotic resistance gene such as ampicillin or kanamycin. Selectable markers for use in cultured mammalian cells include genes that confer resistance to drugs, such as neomycin, hygromycin, and methotrexate. The selectable marker may be an amplifiable selectable marker. One amplifiable selectable marker is the dihydrofolate reductase (DHFR) gene. Simonsen C C et al. (1983) Proc Natl Acad Sci USA 80:2495-9. Selectable markers are reviewed by Thilly (1986) Mammalian Cell Technology, Butterworth Publishers, Stoneham, Mass., and the choice of selectable markers is well within the level of ordinary skill in the art.

[0258] Selectable markers may be introduced into the cell on a separate plasmid at the same time as the gene of interest, or they may be introduced on the same plasmid. If on the same plasmid, the selectable marker and the gene of interest may be under the control of different promoters or the same promoter, the latter arrangement producing a dicistronic message. Constructs of this type are known in the art (for example, U.S. Pat. No. 4,713,339).

[0259] The expression vectors can encode for tags that permit easy purification of the recombinantly produced protein. Examples include, but are not limited to, vector pUR278 (Ruther et al. (1983) EMBO J2:1791), in which coding sequences for the protein to be expressed may be ligated into the vector in frame with the lac z coding region so that a tagged fusion protein is produced; pGEX vectors may be used to express proteins of the invention with a glutathione 5-transferase (GST) tag. These proteins are usually soluble and can easily be purified from cells by adsorption to glutathione-agarose beads followed by elution in the presence of free glutathione. The vectors include cleavage sites (thrombin or Factor Xa protease or PRESCISSION PROTEASE™ (Pharmacia, Peapack, N.J.)) for easy removal of the tag after purification.

[0260] The expression vector or vectors are then transfected or co-transfected into a suitable target cell, which will express the polypeptides. Transfection techniques known in the art include, but are not limited to, calcium phosphate precipitation (Wigler et al. (1978) Cell 14:725), electroporation (Neumann et al. (1982) EMBO J 1:841), and liposome-based reagents. A variety of host-expression vector systems may be utilized to express the proteins described herein including both prokaryotic and eukaryotic cells. These include, but are not limited to, microorganisms such as bacteria (e.g., E. coli) transformed with recombinant bacteriophage DNA or plasmid DNA expression vectors containing an appropriate coding sequence; yeast or filamentous fungi transformed with recombinant yeast or fungi expression vectors containing an appropriate coding sequence; insect cell systems infected with recombinant virus expression vectors (e.g., baculovirus) containing an appropriate coding sequence; plant cell systems infected with recombinant virus expression vectors (e.g., cauliflower mosaic virus or tobacco mosaic virus) or transformed with recombinant plasmid expression vectors (e.g., Ti plasmid) containing an appropriate coding sequence; or animal cell systems, including mammalian cells (e.g., HEK 293, CHO, Cos, HeLa, HKB11, and BHK cells).

[0261] In one embodiment, the host cell is a eukaryotic cell. As used herein, a eukaryotic cell refers to any animal or plant cell having a definitive nucleus. Eukaryotic cells of animals include cells of vertebrates, e g., mammals, and cells of invertebrates, e.g., insects. Eukaryotic cells of plants specifically can include, without limitation, yeast cells. A eukaryotic cell is distinct from a prokaryotic cell, e.g., bacteria.

[0262] In certain embodiments, the eukaryotic cell is a mammalian cell. A mammalian cell is any cell derived from a mammal Mammalian cells specifically include, but are not limited to, mammalian cell lines. In one embodiment, the mammalian cell is a human cell. In another embodiment, the mammalian cell is a HEK 293 cell, which is a human embryonic kidney cell line. HEK 293 cells are available as CRL-1533 from American Type Culture Collection, Manassas, Va., and as 293-H cells, Catalog No. 11631-017 or 293-F cells, Catalog No. 11625-019 from Invitrogen (Carlsbad, Calif.). In some embodiments, the mammalian cell is a PER.C6® cell, which is a human cell line derived from retina. PER.C6® cells are available from Crucell (Leiden, The Netherlands). In other embodiments, the mammalian cell is a Chinese hamster ovary (CHO) cell. CHO cells are available from American Type Culture Collection, Manassas, Va. (e.g., CHO-K1; CCL-61). In still other embodiments, the mammalian cell is a baby hamster kidney (BHK) cell. BHK cells are available from American Type Culture Collection, Manassas, Va. (e.g., CRL-1632). In some embodiments, the mammalian cell is a HKB11 cell, which is a hybrid cell line of a HEK293 cell and a human B cell line. Mei et al., Mol. Biotechnol. 34(2): 165-78 (2006).

[0263] In one embodiment, a plasmid including a FVIII(X2)-Fc fusion coding sequence, a VWF protein-L1-X1-L2-Fc coding sequence, or both and a selectable marker, e.g., zeocin resistance, are transfected into HEK 293 cells, for production of a chimeric protein.

[0264] In another embodiment, a plasmid including a FVIII-Fc fusion coding sequence, a VWF protein-L1-X-L2-Fc coding sequence, or both and a selectable marker, e.g., zeocin resistance, are transfected into HEK 293 cells, for production of a chimeric protein.

[0265] In some embodiments, a first plasmid including a FVIII(X2)-Fc fusion coding sequence and a first selectable marker, e.g., a zeocin resistance gene, and a second plasmid including a VWF protein-L1-X1-L2-Fc coding sequence and a second selectable marker, e.g., a neomycin resistance gene, and a third plasmid including a protein convertase coding sequence and a third selectable marker, e.g., a hygromycin resistance gene, are cotransfected into HEK 293 cells, for production of the chimeric protein. The first and second plasmids can be introduced in equal amounts (i.e., 1:1 molar ratio), or they can be introduced in unequal amounts.

[0266] In still other embodiments, a first plasmid including a FVIII-Fc fusion coding sequence and a first selectable marker, e.g., a zeocin resistance gene, and a second plasmid including a VWF protein-L1-X-L2-Fc coding sequence and a second selectable marker, e.g., a neomycin resistance gene, and a third plasmid including a protein convertase coding sequence and a third selectable marker, e.g., a hygromycin resistance gene, are cotransfected into HEK 293 cells, for production of the chimeric protein. The first and second plasmids can be introduced in equal amounts (i.e., 1:1 molar ratio), or they can be introduced in unequal amounts.

[0267] In yet other embodiments, a first plasmid including a FVIII(X2)-Fc fusion coding sequence and a first selectable marker, e.g., a zeocin resistance gene, and a second plasmid including a VWF protein-L1-X1-L2-Fc fusion coding sequence and a second selectable marker, e.g., a neomycin resistance gene, and a third plasmid including a protein convertase coding sequence and a third selectable marker, e.g., a hygromycin resistance gene, are cotransfected into HEK 293 cells, for production of the chimeric protein. The first and second plasmids can be introduced in equal amounts (i.e., 1:1 molar ratio), or they can be introduced in unequal amounts.

[0268] In certain embodiments, a first plasmid, including a chimeric protein encoding FVIII (with or without XTEN)-F1-L3-F2-L2-X-L1-V coding sequence and a first selectable marker, e.g., a zeocin resistance gene, and a second plasmid including a protein convertase coding sequence and a second selectable marker, e.g., a hygromycin resistance gene, are cotransfected into HEK 293 cells, for production of the chimeric protein. The promoters for the FVIII(X)-F1 coding sequence and the V-L2-X-L1-F2 coding sequence can be different or they can be the same.

[0269] In still other embodiments, transfected cells are stably transfected. These cells can be selected and maintained as a stable cell line, using conventional techniques known to those of skill in the art.

[0270] Host cells containing DNA constructs of the protein are grown in an appropriate growth medium. As used herein, the term “appropriate growth medium” means a medium containing nutrients required for the growth of cells. Nutrients required for cell growth may include a carbon source, a nitrogen source, essential amino acids, vitamins, minerals, and growth factors. Optionally, the media can contain one or more selection factors. Optionally the media can contain bovine calf serum or fetal calf serum (FCS). In one embodiment, the media contains substantially no IgG. The growth medium will generally select for cells containing the DNA construct by, for example, drug selection or deficiency in an essential nutrient which is complemented by the selectable marker on the DNA construct or co-transfected with the DNA construct. Cultured mammalian cells are generally grown in commercially available serum-containing or serum-free media (e.g., MEM, DMEM, DMEM/F12). In one embodiment, the medium is CD293 (Invitrogen, Carlsbad, Calif.). In another embodiment, the medium is CD17 (Invitrogen, Carlsbad, Calif.). Selection of a medium appropriate for the particular cell line used is within the level of those ordinary skilled in the art.

[0271] In order to co-express the two polypeptide chains of the chimeric protein, the host cells are cultured under conditions that allow expression of both chains. As used herein, culturing refers to maintaining living cells in vitro for at least a definite time. Maintaining can, but need not include, an increase in population of living cells. For example, cells maintained in culture can be static in population, but still viable and capable of producing a desired product, e.g., a recombinant protein or recombinant fusion protein. Suitable conditions for culturing eukaryotic cells are well known in the art and include appropriate selection of culture media, media supplements, temperature, pH, oxygen saturation, and the like. For commercial purposes, culturing can include the use of any of various types of scale-up systems including shaker flasks, roller bottles, hollow fiber bioreactors, stirred-tank bioreactors, airlift bioreactors, Wave bioreactors, and others.

[0272] The cell culture conditions are also selected to allow association of the VWF fragment with the FVIII protein. Conditions that allow expression of the VWF fragment and/or the FVIII protein may include the presence of a source of vitamin K. For example, in one embodiment, stably transfected HEK 293 cells are cultured in CD293 media (Invitrogen, Carlsbad, Calif.) or OptiCHO media (Invitrogen, Carlsbad, Calif.) supplemented with 4 mM glutamine.

[0273] In one aspect, the present invention is directed to a method of expressing, making, or producing the chimeric protein of the invention comprising a) transfecting a host cell comprising a polynucleotide encoding the chimeric protein and b) culturing the host cell in a culture medium under a condition suitable for expressing the chimeric protein, wherein the chimeric protein is expressed.

[0274] In further embodiments, the protein product containing the FVIII protein linked to a first Ig constant region or a portion thereof and/or the VWF protein fused to a second Ig constant region or a portion thereof by an XTEN sequence is secreted into the media. Media is separated from the cells, concentrated, filtered, and then passed over two or three affinity columns, e.g., a protein A column and one or two anion exchange columns.

[0275] In certain aspects, the present invention relates to the chimeric protein produced by the methods described herein.

[0276] In vitro production allows scale-up to give large amounts of the desired altered polypeptides of the invention. Techniques for mammalian cell cultivation under tissue culture conditions are known in the art and include homogeneous suspension culture, e.g. in an airlift reactor or in a continuous stirrer reactor, or immobilized or entrapped cell culture, e.g. in hollow fibers, microcapsules, on agarose microbeads or ceramic cartridges. If necessary and/or desired, the solutions of polypeptides can be purified by the customary chromatography methods, for example gel filtration, ion-exchange chromatography, hydrophobic interaction chromatography (HIC, chromatography over DEAE-cellulose or affinity chromatography.

### IV. PHARMACEUTICAL COMPOSITION

[0277] Compositions containing the chimeric protein of the present invention may contain a suitable pharmaceutically acceptable carrier. For example, they may contain excipients and/or auxiliaries that facilitate processing of the active compounds into preparations designed for delivery to the site of action.

[0278] The pharmaceutical composition can be formulated for parenteral administration (i.e. intravenous, subcutaneous, or intramuscular) by bolus injection. Formulations for injection can be presented in unit dosage form, e.g., in ampoules or in multidose containers with an added preservative. The compositions can take such forms as suspensions, solutions, or emulsions in oily or aqueous vehicles, and contain formulatory agents such as suspending, stabilizing and/or dispersing agents. Alternatively, the active ingredient can be in powder form for constitution with a suitable vehicle, e.g., pyrogen free water.

[0279] Suitable formulations for parenteral administration also include aqueous solutions of the active compounds in water-soluble form, for example, water-soluble salts. In addition, suspensions of the active compounds as appropriate oily injection suspensions may be administered. Suitable lipophilic solvents or vehicles include fatty oils, for example, sesame oil, or synthetic fatty acid esters, for example, ethyl oleate or triglycerides. Aqueous injection suspensions may contain substances, which increase the viscosity of the suspension, including, for example, sodium carboxymethyl cellulose, sorbitol and dextran. Optionally, the suspension may also contain stabilizers. Liposomes also can be used to encapsulate the molecules of the invention for delivery into cells or interstitial spaces. Exemplary pharmaceutically acceptable carriers are physiologically compatible solvents, dispersion media, coatings, antibacterial and antifungal agents, isotonic and absorption delaying agents, water, saline, phosphate buffered saline, dextrose, glycerol, ethanol and the like. In some embodiments, the composition comprises isotonic agents, for example, sugars, polyalcohols such as mannitol, sorbitol, or sodium chloride. In other embodiments, the compositions comprise pharmaceutically acceptable substances such as wetting agents or minor amounts of auxiliary substances such as wetting or emulsifying agents, preservatives or buffers, which enhance the shelf life or effectiveness of the active ingredients.

[0280] Compositions of the invention may be in a variety of forms, including, for example, liquid (e.g., injectable and infusible solutions), dispersions, suspensions, semi-solid and solid dosage forms. The preferred form depends on the mode of administration and therapeutic application.

[0281] The composition can be formulated as a solution, micro emulsion, dispersion, liposome, or other ordered structure suitable to high drug concentration. Sterile injectable solutions can be prepared by incorporating the active ingredient in the required amount in an appropriate solvent with one or a combination of ingredients enumerated above, as required, followed by filtered sterilization. Generally, dispersions are prepared by incorporating the active ingredient into a sterile vehicle that contains a basic dispersion medium and the required other ingredients from those enumerated above. In the case of sterile powders for the preparation of sterile injectable solutions, the preferred methods of preparation are vacuum drying and freeze-drying that yields a powder of the active ingredient plus any additional desired ingredient from a previously sterile-filtered solution. The proper fluidity of a solution can be maintained, for example, by the use of a coating such as lecithin, by the maintenance of the required particle size in the case of dispersion and by the use of surfactants. Prolonged absorption of injectable compositions can be brought about by including in the composition an agent that delays absorption, for example, monostearate salts and gelatin.

[0282] The active ingredient can be formulated with a controlled-release formulation or device. Examples of such formulations and devices include implants, transdermal patches, and microencapsulated delivery systems. Biodegradable, biocompatible polymers can be used, for example, ethylene vinyl acetate, polyanhydrides, polyglycolic acid, collagen, polyorthoesters, and polylactic acid. Methods for the preparation of such formulations and devices are known in the art. See e.g., Sustained and Controlled Release Drug Delivery Systems, J. R. Robinson, ed., Marcel Dekker, Inc., New York, 1978.

[0283] Injectable depot formulations can be made by forming microencapsulated matrices of the drug in biodegradable polymers such as polylactide-polyglycolide. Depending on the ratio of drug to polymer, and the nature of the polymer employed, the rate of drug release can be controlled. Other exemplary biodegradable polymers are polyorthoesters and polyanhydrides. Depot injectable formulations also can be prepared by entrapping the drug in liposomes or microemulsions.

[0284] Supplementary active compounds can be incorporated into the compositions. In one embodiment, the chimeric protein of the invention is formulated with another clotting factor, or a variant, fragment, analogue, or derivative thereof. For example, the clotting factor includes, but is not limited to, factor V, factor VII, factor VIII, factor IX, factor X, factor XI, factor XII, factor XIII, prothrombin, fibrinogen, von Willebrand factor or recombinant soluble tissue factor (rsTF) or activated forms of any of the preceding. The clotting factor of hemostatic agent can also include anti-fibrinolytic drugs, e.g., epsilon-amino-caproic acid, tranexamic acid.

[0285] Dosage regimens may be adjusted to provide the optimum desired response. For example, a single bolus may be administered, several divided doses may be administered over time, or the dose may be proportionally reduced or increased as indicated by the exigencies of the therapeutic situation. It is advantageous to formulate parenteral compositions in dosage unit form for ease of administration and uniformity of dosage. See, e.g., Remington's Pharmaceutical Sciences (Mack Pub. Co., Easton, Pa. 1980).

[0286] In addition to the active compound, the liquid dosage form may contain inert ingredients such as water, ethyl alcohol, ethyl carbonate, ethyl acetate, benzyl alcohol, benzyl benzoate, propylene glycol, 1,3-butylene glycol, dimethylformamide, oils, glycerol, tetrahydrofurfuryl alcohol, polyethylene glycols, and fatty acid esters of sorbitan.

[0287] Non-limiting examples of suitable pharmaceutical carriers are also described in Remington's Pharmaceutical Sciences by E. W. Martin. Some examples of excipients include starch, glucose, lactose, sucrose, gelatin, malt, rice, flour, chalk, silica gel, sodium stearate, glycerol monostearate, talc, sodium chloride, dried skim milk, glycerol, propylene, glycol, water, ethanol, and the like. The composition can also contain pH buffering reagents, and wetting or emulsifying agents.

[0288] For oral administration, the pharmaceutical composition can take the form of tablets or capsules prepared by conventional means. The composition can also be prepared as a liquid for example a syrup or a suspension. The liquid can include suspending agents (e.g., sorbitol syrup, cellulose derivatives or hydrogenated edible fats), emulsifying agents (lecithin or acacia), non-aqueous vehicles (e.g., almond oil, oily esters, ethyl alcohol, or fractionated vegetable oils), and preservatives (e.g., methyl or propyl-p-hydroxybenzoates or sorbic acid). The preparations can also include flavoring, coloring and sweetening agents. Alternatively, the composition can be presented as a dry product for constitution with water or another suitable vehicle.

[0289] For buccal administration, the composition may take the form of tablets or lozenges according to conventional protocols.

[0290] For administration by inhalation, the compounds for use according to the present invention are conveniently delivered in the form of a nebulized aerosol with or without excipients or in the form of an aerosol spray from a pressurized pack or nebulizer, with optionally a propellant, e.g., dichlorodifluoromethane, trichlorofluoromethane, dichlorotetrafluoromethane, carbon dioxide or other suitable gas. In the case of a pressurized aerosol the dosage unit can be determined by providing a valve to deliver a metered amount. Capsules and cartridges of, e.g., gelatin for use in an inhaler or insufflator can be formulated containing a powder mix of the compound and a suitable powder base such as lactose or starch.

[0291] The pharmaceutical composition can also be formulated for rectal administration as a suppository or retention enema, e.g., containing conventional suppository bases such as cocoa butter or other glycerides.

[0292] In one embodiment, a pharmaceutical composition comprises a chimeric protein, the polynucleotide encoding the chimeric protein, the vector comprising the polynucleotide, or the host cell comprising the vector, and a pharmaceutically acceptable carrier. The FVIII protein in a chimeric protein has extended half-life compared to wild type FVIII protein or the corresponding FVIII protein without the VWF fragment. In one embodiment, wherein the half-life of the chimeric protein is extended at least about 1.5 times, at least about 2 times, at least about 2.5 times, at least about 3 times, at least about 4 times, at least about 5 times, at least about 6 times, at least about 7 times, at least about 8 times, at least about 9 times, at least about 10 times, at least about 11 times, or at least about 12 times longer than wild type FVIII. In another embodiment, the half-life of Factor VIII is at least about 17 hours, at least about 18 hours, at least about 19 hours, at least about 20 hours, at least about 21 hours, at least about 22 hours, at least about 23 hours, at least about 24 hours, at least about 25 hours, at least about 26 hours, at least about 27 hours, at least about 28 hours, at least about 29 hours, at least about 30 hours, at least about 31 hours, at least about 32 hours, at least about 33 hours, at least about 34 hours, at least about 35 hours, at least about 36 hours, at least about 48 hours, at least about 60 hours, at least about 72 hours, at least about 84 hours, at least about 96 hours, or at least about 108 hours.

[0293] In some embodiments, the composition is administered by a route selected from the group consisting of topical administration, intraocular administration, parenteral administration, intrathecal administration, subdural administration and oral administration. The parenteral administration can be intravenous or subcutaneous administration.

[0294] In other embodiments, the composition is used to treat a bleeding disease or condition in a subject in need thereof. The bleeding disease or condition is selected from the group consisting of a bleeding coagulation disorder, hemarthrosis, muscle bleed, oral bleed, hemorrhage, hemorrhage into muscles, oral hemorrhage, trauma, trauma capitis, gastrointestinal bleeding, intracranial hemorrhage, intra-abdominal hemorrhage, intrathoracic hemorrhage, bone fracture, central nervous system bleeding, bleeding in the retropharyngeal space, bleeding in the retroperitoneal space, bleeding in the illiopsoas sheath and any combinations thereof. In still other embodiments, the subject is scheduled to undergo a surgery. In yet other embodiments, the treatment is prophylactic or on-demand

### V. GENE THERAPY

[0295] A chimeric protein thereof of the invention can be produced in vivo in a mammal, e.g., a human patient, using a gene therapy approach to treatment of a bleeding disease or disorder selected from the group consisting of a bleeding coagulation disorder, hemarthrosis, muscle bleed, oral bleed, hemorrhage, hemorrhage into muscles, oral hemorrhage, trauma, trauma capitis, gastrointestinal bleeding, intracranial hemorrhage, intra-abdominal hemorrhage, intrathoracic hemorrhage, bone fracture, central nervous system bleeding, bleeding in the retropharyngeal space, bleeding in the retroperitoneal space, and bleeding in the illiopsoas sheath would be therapeutically beneficial. In one embodiment, the bleeding disease or disorder is hemophilia. In another embodiment, the bleeding disease or disorder is hemophilia A. This involves administration of a suitable chimeric protein-encoding nucleic acid operably linked to suitable expression control sequences. In certain embodiment, these sequences are incorporated into a viral vector. Suitable viral vectors for such gene therapy include adenoviral vectors, lentiviral vectors, baculoviral vectors, Epstein Barr viral vectors, papovaviral vectors, vaccinia viral vectors, herpes simplex viral vectors, and adeno associated virus (AAV) vectors. The viral vector can be a replication-defective viral vector. In other embodiments, an adenoviral vector has a deletion in its E1 gene or E3 gene. When an adenoviral vector is used, the mammal may not be exposed to a nucleic acid encoding a selectable marker gene. In other embodiments, the sequences are incorporated into a non-viral vector known to those skilled in the art.

### VI. METHODS OF USING CHIMERIC PROTEIN

[0296] The present invention is directed to a method of using a chimeric protein described herein to prevent or inhibit endogenous VWF binding to a FVIII protein. The present invention is also directed to a method of using a chimeric protein having a FVIII protein linked to XTEN and an Ig constant region or a portion thereof.

[0297] One aspect of the present invention is directed to preventing or inhibiting FVIII interaction with endogenous VWF by blocking or shielding the VWF binding site on the FVIII from endogenous VWF and at the same time extending half-life of the chimeric protein using an XTEN sequence in combination with an Ig constant region or a portion thereof, which can also be a half-life extender. In one embodiment, the invention is directed to a method of constructing a FVIII protein having half-life longer than wild-type FVIII. The chimeric protein useful in the method includes any one or more chimeric protein described herein.

[0298] Another aspect of the invention includes a method of administering to a subject in need thereof a chimeric protein comprising a FVIII protein having half-life longer than wild-type FVIII, wherein the method comprises administering the chimeric protein described herein to the subject.

[0299] In one embodiment, the invention is directed to a method of using an XTEN sequence and an Ig constant region or a portion thereof to improve a half-life of a chimeric protein comprising FVIII protein and a VWF protein, which prevents or inhibits endogenous VWF interaction with a FVIII protein. A FVIII protein linked to an XTEN sequence (e.g., FVIII(X)) and then bound to or associated with a VWF protein fused to an XTEN and an Ig constant region or a portion thereof is shielded or protected from the clearance pathway of VWF and thus has reduced clearance compared to the FVIII protein not bound to the VWF protein. The shielded FVIII protein thus has maximum extension of a half-life compared to a FVIII protein not bound to or associated with the XTEN sequence and the VWF protein. In certain embodiments, the FVIII protein associated with or protected by a VWF protein and linked to an XTEN sequence is not cleared by a VWF clearance receptor. In other embodiments, the FVIII protein associated with or protected by a VWF protein and linked to an XTEN sequence is cleared from the system slower than the FVIII protein that is not associated with or protected by the VWF protein and linked to the XTEN sequence.

[0300] In one aspect, the chimeric protein comprising the FVIII protein linked to an XTEN sequence or the FVIII protein bound to or associated with a VWF protein linked to XTEN has reduced clearance from circulation as the VWF protein does not contain a VWF clearance receptor binding site. The VWF protein prevents or inhibits clearance of FVIII bound to or associated with the VWF protein from the system through the VWF clearance pathway. The VWF proteins useful for the present invention can also provide at least one or more VWF-like FVIII protection properties that are provided by endogenous VWF. In certain embodiments, the VWF protein or the XTEN sequence can also mask one or more FVIII clearance receptor binding site, thereby preventing clearance of FVIII by its own clearance pathway.

[0301] In some embodiments, the prevention or inhibition of a FVIII protein binding to endogenous VWF by the VWF protein or the XTEN sequence can be in vitro or in vivo.

[0302] Also provided is a method of increasing the half-life of a chimeric protein comprising administering the chimeric protein described herein to a subject in need thereof. The half-life of non-activated FVIII bound to or associated with full-length VWF is about 12 to 14 hours in plasma. In VWD type 3, wherein there is almost no VWF in circulation, the half-life of FVIII is only about six hours, leading to symptoms of mild to moderate hemophilia A in such patients due to decreased concentrations of FVIII. The half-life of the chimeric protein linked to or associated with the VWF fragment or the XTEN sequence of the present invention can increase at least about 1.5 times, 1.6 times, 1.7 times, 1.8 times, 1.9 times, 2.0 times, 2.1 times, 2.2 times, 2.3 times, 2.4 times, 2.6 times, 2.7. times, 2.8 times, 2.9 times, 3.0 times, 3.1 times, 3.2 times, 3.3 times, 3.4 times, 3.5 times, 3.6 times, 3.7 times, 3.8 times, 3.9 times, or 4.0 times higher than the half-life of the non-activated FVIII bound to or associated with full-length VWF.

[0303] In one embodiment, a chimeric protein comprising a first polypeptide comprising a FVIII protein and a first Ig constant region or a portion thereof and a second polypeptide comprising a VWF protein, an XTEN having less than 288 amino acids, and an Ig constant region or a portion thereof exhibits a half-life at least about 2 times, 2.5 times, 3.0 times, 3.5 times, 4.0 times, 4.5 times, 5.0 times, 5.5 times, 6.0 times, 7 times, 8 times, 9 times, or 10 times higher than a corresponding chimeric protein comprising the same first polypeptide and the second polypeptide without the XTEN sequence or wild type FVIII. In another embodiment, a chimeric protein comprising a first polypeptide comprising a FVIII protein and a first Ig constant region or a portion thereof and a second polypeptide comprising a VWF protein, an XTEN having less than 288 amino acids, and an Ig constant region or a portion thereof exhibits a half-life about 2 to about 5 times, about 3 to about 10 times, about 5 to about 15 times, about 10 to about 20 times, about 15 to about 25 times, about 20 to about 30 times, about 25 to about 35 times, about 30 to about 40 times, about 35 to about 45 times higher than a corresponding chimeric protein comprising the same first polypeptide and the second polypeptide without the XTEN sequence or wild type FVIII. In a specific embodiment, the half-life of a chimeric protein of the invention increases at least about 30, 31, 32, 33, 34, 35, 36, 37, 38, 39, or 40 times higher than the half-life of the wild type FVIII in a FVIII and VWF double knockout mouse.

[0304] In certain embodiments, a chimeric protein exhibits a half-life of about 40 hours in mice.

[0305] In some embodiments, the half-life of a chimeric protein is longer than the half-life of a FVIII associated with endogenous VWF. In other embodiments, the half-life of the chimeric protein is at least about 1.5 times, 2 times, 2.5 times, 3.5 times, 3.6 times, 3.7 times, 3.8 times, 3.9 times, 4.0 times, 4.5 times, or 5.0 times the half-life of wild type FVIII or a FVIII protein associated with endogenous VWF.

[0306] In some embodiments, as a result of the invention the half-life of the chimeric protein is extended compared to a FVIII protein without the VWF protein or wild-type FVIII. The half-life of the chimeric protein of the invention is at least about 1.5 times, at least about 2 times, at least about 2.5 times, at least about 3 times, at least about 4 times, at least about 5 times, at least about 6 times, at least about 7 times, at least about 8 times, at least about 9 times, at least about 10 times, at least about 11 times, or at least about 12 times longer than the half-life of a chimeric protein without the VWF protein or wild-type FVIII. In one embodiment, the half-life of FVIII is about 1.5-fold to about 20-fold, about 1.5 fold to about 15 fold, or about 1.5 fold to about 10 fold longer than the half-life of wild-type FVIII. In another embodiment, the half-life of the FVIII is extended about 2-fold to about 10-fold, about 2-fold to about 9-fold, about 2-fold to about 8-fold, about 2-fold to about 7-fold, about 2-fold to about 6-fold, about 2-fold to about 5-fold, about 2-fold to about 4-fold, about 2-fold to about 3-fold, about 2.5-fold to about 10-fold, about 2.5-fold to about 9-fold, about 2.5-fold to about 8-fold, about 2.5-fold to about 7-fold, about 2.5-fold to about 6-fold, about 2.5-fold to about 5-fold, about 2.5-fold to about 4-fold, about 2.5-fold to about 3-fold, about 3-fold to about 10-fold, about 3-fold to about 9-fold, about 3-fold to about 8-fold, about 3-fold to about 7-fold, about 3-fold to about 6-fold, about 3-fold to about 5-fold, about 3-fold to about 4-fold, about 4-fold to about 6 fold, about 5-fold to about 7-fold, or about 6-fold to about 8 fold as compared to wild-type FVIII or a FVIII protein without the VWF protein. In other embodiments, the half-life of the chimeric protein of the invention is at least about 17 hours, at least about 18 hours, at least about 19 hours, at least about 20 hours, at least about 21 hours, at least about 22 hours, at least about 23 hours, at least about 24 hours, at least about 25 hours, at least about 26 hours, at least about 27 hours, at least about 28 hours, at least about 29 hours, at least about 30 hours, at least about 31 hours, at least about 32 hours, at least about 33 hours, at least about 34 hours, at least about 35 hours, at least about 36 hours, at least about 40 hours, at least about 48 hours, at least about 60 hours, at least about 72 hours, at least about 84 hours, at least about 96 hours, or at least about 108 hours. In still other embodiments, the half-life of the chimeric protein of the invention is about 15 hours to about two weeks, about 16 hours to about one week, about 17 hours to about one week, about 18 hours to about one week, about 19 hours to about one week, about 20 hours to about one week, about 21 hours to about one week, about 22 hours to about one week, about 23 hours to about one week, about 24 hours to about one week, about 36 hours to about one week, about 48 hours to about one week, about 60 hours to about one week, about 24 hours to about six days, about 24 hours to about five days, about 24 hours to about four days, about 24 hours to about three days, or about 24 hours to about two days.

[0307] In some embodiments, the average half-life of the chimeric protein of the invention per subject is about 15 hours, about 16 hours, about 17 hours, about 18 hours, about 19 hours, about 20 hours, about 21 hours, about 22 hours, about 23 hours, about 24 hours (1 day), about 25 hours, about 26 hours, about 27 hours, about 28 hours, about 29 hours, about 30 hours, about 31 hours, about 32 hours, about 33 hours, about 34 hours, about 35 hours, about 36 hours, about 40 hours, about 44 hours, about 48 hours (2 days), about 54 hours, about 60 hours, about 72 hours (3 days), about 84 hours, about 96 hours (4 days), about 108 hours, about 120 hours (5 days), about six days, about seven days (one week), about eight days, about nine days, about 10 days, about 11 days, about 12 days, about 13 days, or about 14 days.

[0308] In addition, the invention provides a method of treating or preventing a bleeding disease or disorder comprising administering an effective amount of a chimeric protein. In one embodiment, the bleeding disease or disorder is selected from the group consisting of a bleeding coagulation disorder, hemarthrosis, muscle bleed, oral bleed, hemorrhage, hemorrhage into muscles, oral hemorrhage, trauma, trauma capitis, gastrointestinal bleeding, intracranial hemorrhage, intra-abdominal hemorrhage, intrathoracic hemorrhage, bone fracture, central nervous system bleeding, bleeding in the retropharyngeal space, bleeding in the retroperitoneal space, and bleeding in the illiopsoas sheath. In a specific embodiment, the bleeding disease or disorder is hemophilia A.

[0309] The chimeric protein comprising an XTEN sequence and an Ig constant region or a portion thereof in combination with a VWF protein described herein, that prevents or inhibits interaction of the FVIII protein with endogenous VWF prepared by the invention, has many uses as will be recognized by one skilled in the art, including, but not limited to methods of treating a subject having a hemostatic disorder and methods of treating a subject in need of a general hemostatic agent. In one embodiment, the invention relates to a method of treating a subject having a hemostatic disorder comprising administering a therapeutically effective amount of the chimeric protein.

[0310] The FVIII protein portion in the chimeric protein treats or prevents a hemostatic disorder by serving as a cofactor to Factor IX on a negatively charged phospholipid surface, thereby forming a Xase complex. The binding of activated coagulation factors to a phospholipid surface localizes this process to sites of vascular damage. On a phospholipid surface, Factor VIIIa increases the maximum velocity of Factor X activation by Factor IXa, by approximately 200,000-fold, leading to the large second burst of thrombin generation.

[0311] The chimeric protein of the invention can be used to treat any hemostatic disorder. The hemostatic disorders that may be treated by administration of the chimeric protein of the invention include, but are not limited to, hemophilia A, as well as deficiencies or structural abnormalities relating to Factor VIII. In one embodiment, the hemostatic disorder is hemophilia A.

[0312] The chimeric protein of the invention can be used prophylactically to treat a subject with a hemostatic disorder. The chimeric protein of the invention can be used to treat an acute bleeding episode in a subject with a hemostatic disorder. In another embodiment, the hemostatic disorder can be the result of a defective clotting factor, e.g., von Willebrand's factor. In one embodiment, the hemostatic disorder is an inherited disorder. In another embodiment, the hemostatic disorder is an acquired disorder. The acquired disorder can result from an underlying secondary disease or condition. The unrelated condition can be, as an example, but not as a limitation, cancer, an auto-immune disease, or pregnancy. The acquired disorder can result from old age or from medication to treat an underlying secondary disorder (e.g. cancer chemotherapy).

[0313] The invention also relates to methods of treating a subject that does not have a congenital hemostatic disorder, but has a secondary disease or condition resulting in acquisition of a hemostatic disorder, e.g., due to development of an anti-FVIII antibody or a surgery. The invention thus relates to a method of treating a subject in need of a general hemostatic agent comprising administering a therapeutically effective amount of the chimeric protein prepared by the present methods.

[0314] The present invention is also related to methods of reducing immunogenicity of FVIII or inducing less immunogenicity against FVIII comprising administering an effective amount of the chimeric proteins described herein, or the polynucleotides encoding the same.

[0315] In one embodiment, the subject in need of a general hemostatic agent is undergoing, or is about to undergo, surgery. The chimeric protein of the invention can be administered prior to, during, or after surgery as a prophylactic regimen. The chimeric protein of the invention can be administered prior to, during, or after surgery to control an acute bleeding episode.

[0316] The chimeric protein of the invention can be used to treat a subject having an acute bleeding episode who does not have a hemostatic disorder. The acute bleeding episode can result from severe trauma, e.g., surgery, an automobile accident, wound, laceration gun shot, or any other traumatic event resulting in uncontrolled bleeding. Non limiting examples of bleeding episodes include a bleeding coagulation disorder, hemarthrosis, muscle bleed, oral bleed, hemorrhage, hemorrhage into muscles, oral hemorrhage, trauma, trauma capitis, gastrointestinal bleeding, intracranial hemorrhage, intra-abdominal hemorrhage, intrathoracic hemorrhage, bone fracture, central nervous system bleeding, bleeding in the retropharyngeal space, bleeding in the retroperitoneal space, bleeding in the illiopsoas sheath, and any combinations thereof.

[0317] In prophylactic applications, one or more compositions containing the chimeric protein of the invention or a cocktail thereof are administered to a patient not already in the disease state to enhance the patient's resistance or reduce symptoms associated with a disease or disorder. Such an amount is defined to be a “prophylactic effective dose.” In therapeutic applications, a relatively high dosage (e.g., from about 1 to 400 mg/kg of polypeptide per dose, with dosages of from 5 to 25 mg being more commonly used for radioimmuno conjugates and higher doses for cytotoxin-drug modified polypeptides) at relatively short intervals is sometimes required until progression of the disease is reduced or terminated, and until the patient shows partial or complete amelioration of symptoms of disease. Thereafter, the patient can be administered a prophylactic regime.

[0318] In some embodiments, a chimeric protein or a composition of the invention is used for on-demand treatment, which includes treatment for a bleeding episode, hemarthrosis, muscle bleed, oral bleed, hemorrhage, hemorrhage into muscles, oral hemorrhage, trauma, trauma capitis (head trauma), gastrointestinal bleeding, intracranial hemorrhage, intra-abdominal hemorrhage, intrathoracic hemorrhage, bone fracture, central nervous system bleeding, bleeding in the retropharyngeal space, bleeding in the retroperitoneal space, or bleeding in the illiopsoas sheath. The subject may be in need of surgical prophylaxis, peri-operative management, or treatment for surgery. Such surgeries include, e.g., minor surgery, major surgery, tooth extraction, tonsillectomy, inguinal herniotomy, synovectomy, total knee replacement, craniotomy, osteosynthesis, trauma surgery, intracranial surgery, intra-abdominal surgery, intrathoracic surgery, or joint replacement surgery.

[0319] In one embodiment, the chimeric protein of the present invention is administered intravenously, subcutaneously, intramuscularly, or via any mucosal surface, e.g., orally, sublingually, buccally, nasally, rectally, vaginally or via pulmonary route. The chimeric protein comprising a VWF fragment and a FVIII protein of the present invention can be implanted within or linked to a biopolymer solid support that allows for the slow release of the chimeric protein to the site of bleeding or implanted into bandage/dressing. The dose of the chimeric protein will vary depending on the subject and upon the particular route of administration used. Dosages can range from 0.1 to 100,000 μg/kg body weight. In one embodiment, the dosing range is 0.1-1,000 μg/kg. In another embodiment, the dosing range is 0.1-500 μg/kg. The protein can be administered continuously or at specific timed intervals. In vitro assays may be employed to determine optimal dose ranges and/or schedules for administration. In vitro assays that measure clotting factor activity are known in the art, e.g., STA-CLOT VIIa-rTF clotting assay or ROTEM clotting assay. Additionally, effective doses may be extrapolated from dose-response curves obtained from animal models, e.g., a hemophiliac dog (Mount et al. 2002, Blood 99(8):2670).

[0320] Having now described the present invention in detail, the same will be more clearly understood by reference to the following examples, which are included herewith for purposes of illustration only and are not intended to be limiting of the invention. All patents, publications, and articles referred to herein are expressly and specifically incorporated herein by reference.

### EXAMPLES

[0321] Throughout the examples, the following materials and methods were used unless otherwise stated.

### Materials and Methods

[0322] In general, the practice of the present invention employs, unless otherwise indicated, conventional techniques of chemistry, biophysics, molecular biology, recombinant DNA technology, immunology (especially, e.g., antibody technology), and standard techniques in electrophoresis. See, e.g., Sambrook, Fritsch and Maniatis, Molecular Cloning: Cold Spring Harbor Laboratory Press (1989); Antibody Engineering Protocols (Methods in Molecular Biology), 510, Paul, S., Humana Pr (1996); Antibody Engineering: A Practical Approach (Practical Approach Series, 169), McCafferty, Ed., Irl Pr (1996); Antibodies: A Laboratory Manual, Harlow et al., CS.H.L. Press, Pub. (1999); and Current Protocols in Molecular Biology, eds. Ausubel et al., John Wiley & Sons (1992).

### Example 1

### FVIII-XTEN-Fc/D′D3-XTEN-Fc Heterodimers

[0323] The present invention is directed to generate a chimeric FVIII molecule which is coupled to D′D3 domain of von Willebrand Factor (VWF) protein via Fc domain of IgG. Attached D′D3 domain prevents the interaction of FVIII with endogenous VWF multimers. This molecule serves as a platform to incorporate other half-life extension technologies in order to improve the pharmacokinetics of the chimeric protein. XTEN sequences were incorporated into the FVIII B-domain and in between D′D3 and Fc region to increase the half-life of FVIII/VWF heterodimer

[0324] Thrombin cleavage site in between D′D3 and Fc allows the release of D′D3 domain upon the activation of FVIII molecule by thrombin.

### Example 2

### Plasmid Construction of FVIII-XTEN-Fc/D′D3-Fc Heterodimers

### Cloning of VWF050-IHH Triple Mutation in VWF031

[0325] IHH triple mutation in Fc prevents interaction with FcRn, thus there is no recycling of Fc containing molecule by FcRn pathway. The 3 mutations in Fc are I253A, H310A, H435A.

[0326] VWF050 was generated by swapping the Fc region of VWF031 plasmid with Fc fragment containing IHH triple mutation between the RsRII and Not 1 restriction sites. Cloning of VWF057-Cloning VWF-Fc with 144 AE XTEN+35aa thrombin cleavable linker.

### Oligos

ESC 155-Oligo for 144 AE XTEN in VWF034-rev
CCCCGCCACCGGATCCCCCGCCACCGGATCCCCCGCCACCGGATCCCCC
GCCACCGGAACCTCCACCGCCGCTCGAGGCACCTTCTTCAGTGCTGGTGG
GCGAGCCCGCTGGTGACCCTTCCTC
ESC 156-Oligo for 144 AE XTEN-GS linker in
VWF034-rev
GGGGAAGAGGAAGACTGACGGTCCGCCCAGGAGTTCTGGAGCTGGGCAC
GGTGGGCATGTGTGAGTTTTGTCGCCTCCGCTGCCCCGGGGGACCAGGG
ATCCCCCGCCACCGGATCCCCCGCCACCGGATCCCCCGCCACCGGATC
CCCCGCC
ESC 157-Oligo for 144 AE XTEN in VWF031-Fwd
GTGAAGCCTGCCAGGAGCCGATATCGGGCGCGCCAACATCAGAGAGCGC
CACCCCTGAAAGTGGTCCCGGGAGCGAGCCAGC

[0328] PCR was done twice to obtain the 144 AE-XTEN+35 aa GS linker with thrombin cleavage site.

[0329] First PCR reaction was done using 144-AE XTEN coding DNA as template and ESC 157/ESC155 primer pair. About 550 bp long PCR product obtained from this reaction was used as template for second PCR reaction and was amplified using ESC 157/156 primer pair. This reaction gave ˜700 bp long product. This 700 bp PCR product and VWF034 plasmid was then digested with EcoRV-HF and RsRII. Plasmid backbone from digested.

[0330] VWF034 was then used to ligate 700 bp PCR product.

### Cloning of VWF058-IHH Triple Mutation in VWF034

[0331] IHH triple mutation in Fc prevents interaction with FcRn, thus there is no recycling of Fc containing molecule by FcRn pathway. The 3 mutations in Fc are I253A, H310A, H435A.

[0332] VWF058 was generated by swapping the Fc region of VWF034 plasmid with Fc fragment containing IHH triple mutation between the RsRII and Not 1 restriction sites.

Cloning of FVIII-263-FVIII 205 with IHH Triple Mutation

[0333] IHH triple mutation in Fc prevents interaction with FcRn, thus there is no recycling of Fc containing molecule by FcRn pathway. The 3 mutations in Fc are I253A, H310A, H435A.

[0334] FVIII-263 was generated by swapping the Fc region of FVIII 205 plasmid with Fc fragment containing IHH triple mutation between the RsRII and Not 1 restriction sites.

Cloning of FVIII-282-FVIII-Fc with 144 AE XTEN in B-Domain

ESC 158-Oligo for 144 AE XTEN in B-domain-fwd
AAGAAGCTTCTCTCAAAACGGCGCGCCAACATCAGAGAGCGCCACCCCTG
AAAGTGGTCCCGGGAGCGAGCCAGCCACATCTGGGTCGGAAACGCCAGGC
ESC 159-Oligo for 144 AE XTEN in B-domain-rev
GGTATCATCATAATCGATTTCCTCTTGATCTGACTGAAGAGTAGTACGAG
TTATTTCAGCTTGATGGCGTTTCAAGACTGGTGGGCTCGAGGCACCTTCT
TCAGTGCTGGTGGGCGAGCCCGCTGGTGACCCTTCCTCAGTGGACGTAGG

[0335] First PCR reaction was done using 144-AE XTEN coding DNA as template and ESC 158/ESC159 primer pair. About 550 bp long PCR product obtained from this reaction and FVIII 169 plasmid was then digested with AscI and Cla1. Plasmid backbone from digested FVIII 169 was then used to ligate 550 bp PCR product in order to obtain FVIII 282.

Cloning of FVIII-283-FVIII 169 with IHH Triple Mutation

[0336] IHH triple mutation in Fc prevents interaction with FcRn, thus there is no recycling of Fc containing molecule by FcRn pathway. The 3 mutations in Fc are I253A, H310A, H435A.

[0337] FVIII-283 was generated by swapping the Fc region of FVIII 169 plasmid with Fc fragment containing IHH triple mutation between the RsRII and Not 1 restriction sites.

### Example 3

### Production of FVIII-XTEN-Fc/D′D3-XTEN-Fc in HEK293 Cells

[0338] FIG. 2. Schematic diagram showing the expression of FVIII-XTEN-Fc/D′D3-XTEN-Fc construct. Three plasmids co-transfection was done in HEK293 cells using Polyethylenimine (PEI). First plasmid derives the expression of FVIII-XTEN-Fc, second plasmid expresses D1D2D′D3-XTEN-Fc and the third plasmid expression PACE/furin, which is required to enzymatically remove propeptide, i.e., D1D2 domain from D1D2D′D3-XTEN-Fc. Products of this three plasmid expression system includes of FVIII-XTEN-Fc/D′D3-XTEN-Fc heterodimer, D′D3-XTEN-Fc homodimer and traces of FVIII-XTEN-Fc hemizygous looking species.

### Example 4

### Purification of FVIII-XTEN-Fc/D′D3-XTEN-Fc Heterodimers

[0339] To purify the FVIII-XTEN-Fc/D′D3-XTEN-Fc heterodimers, a tangential flow filtration (TFF) step was used to first concentrate the conditioned media by 10 fold. Products in the filtrate were then further purified using affinity chromatography follow by a desalting column. Purity of the molecule was acceptable by HPLC-SEC and was further confirmed by western blotting. The specific activity of the molecule was comparable to B-domain deleted FVIII, as measured by FVIII activity assay (example 5) and OD280 measurement.

### Example 5

### Specific Activity of FVIII-XTEN-Fc/D′D3-XTEN-Fc Heterodimers

[0340] The activity of FVIII-XTEN-Fc/D′D3-XTEN-Fc heterodimers was measure by FVIII chromogenic assay and activated Partial Thromboplastin Time (aPTT) assay. The specific chromogenic activity and specific aPTT activity of SQ BDD-FVIII, rFVIII169/VWF034 and rFVIII169/VWF057 were listed in Table 16. Compared to SQ BDD-FVIII, we have observed comparable specific chromogenic activities and 60% reduction on the specific aPTT activity for rFVIII169/VWF034 and rFVIII169/VWF057.

TABLE 16
Specific activity of heterodimer variants

| | | | rFVIII160/ |
|---|---|---|---|
| FVIII | SQ BDD-FVIII | rFVIII169/VWF034 | VWF057 |
| Specific | 0.9-2.0 | 1.1-1.2 | 0.8-1.6 |
| Chromogenic | | | |
| Activity (IU/pmol) | | | |
| Specific aPTT | 0.75-1.7 | 0.4 | 0.3-0.6 |
| Activity (IU/pmol) | | | |

### FVIII Chromogenic Assay

[0341] The FVIII activity was measured using the COATEST SP FVIII kit from DiaPharma (produce #: K824086) and all incubations were performed on a 37° C. plate heater with shaking.

[0342] The WHO 8th International Standard for Blood Coagulation Factor VIII:C, Concentrate, coded 07/350 was used as assay standard, the range of the standard was from 100 mIU/mL to 0.78 mIU/mL. A pooled normal human plasma assay control and testing samples (diluted with 1× Coatest buffer) were added into Immulon 2HB 96-well plates in duplicate (25 μL/well). Freshly prepared IXa/FX/Phospholipid mix (50 μL), 25 μL of 25 mM CaCl₂, and 50 μL of FXa substrate were added sequentially into each well with 5 minutes incubation between each addition. After incubating with the substrate, 25 μL, of 20% Acetic Acid was added to terminate the color reaction, and the absorbance of OD405 was measured with a SpectraMAX plus (Molecular Devices) instrument. Data were analyzed with SoftMax Pro software (version 5.2). The Lowest Level of Quantification (LLOQ) is 7.8 mIU/mL.

FVIII aPTT Assay

[0343] The FVIII aPTT assay was performed on the Sysmex CA-1500 coagulation analyzer as follows: First, 50 uL of manually diluted samples, standards and Controls in aPTT buffer (50 mM Tris, 100 mM NaCl, 1% HSA, pH 7.4) were added by the instrument into the reaction cuvette, followed by adding 50 uL of FVIII-deficient plasma (George King Bio-Medical, product #: 0800). Following incubation at 37° C. for 1 minute, 50 uL of aPTT reagent (Actin® FSL activated cephaloplastin reagent—Dade Behring, reference # B4219-2) was added to the reaction mixture, and incubated at 37° C. for 4 minutes. Subsequently, 50 ul of 20 mM CaCl₂ (Dade Behring, reference # ORF037) was added, and the reaction cuvette was immediately transferred to one of four spectrophotometer channel positions to measure the amount of refracted light in the mixture, which was converted to the onset of clotting by the instrument's software algorithm. Reported clotting time was the length of time from the addition of CaCl₂ until the onset of clot formation. Assay standard was generated by diluting the WHO 8th International FVIII Standard into aPTT buffer in a range from 100 mIU/ml to 0.78 mIU/ml. The standard curve was plotted as the clotting time (in seconds) as Y-axis versus the log (base 10) of the FVIII activity (mIU/mL) as X-axis in MS Excel, and the activity of the individual samples was calculated using the formula for the linear regression line of this standard curve. Based on the assay performance, the lower limit of quantization (LLOQ) was 7.8 mIU/mL.

### Example 6

### Additive Effect of XTEN Insertions on the Half-Life Extension of Heterodimer

[0344] XTEN insertions were incorporated into the heterodimers for half-life extension. Insertion of a single 288 amino acid (aa) AE-XTEN at FVIII B-domain resulted in a 16.7 hrs half-life of the heterodimer in HemA mice, as demonstrated by rFVIII169/VWF031 in FIG. 3. To further improve the half-life of the heterodimer, a second XTEN insertion at 144 aa or 288 aa length was incorporated into FVIII169/VWF031 either in the FVIII A1 domain or immediate down stream of D′D3 fragment respectively, the heterodimer variants were named as FVIII205/VWF031 and FVIII169/VWF034.

[0345] The half-life of rFVIII169NWF031, rFVIII205/VWF031 and rFVIII169/VWF034 were evaluated in FVIII deficient (HemA) mice by a single intravenous administration of test molecules at 200 IU/kg dose. Plasma samples were collected at designate time points as indicated in FIG. 3, the FVIII activity of the samples were determined by FVIII chromogenic assay, the PK parameters were calculated using WinNonlin-Phoenix program and listed in Table 17.

[0346] As shown in FIG. 3 and Table 17, the addition of the second XTEN insertion either at A1 domain of FVIII or down stream of D′D3 further improves the half-life of heterodimer to 29.45 or 31.10 respectively. Furthermore, more than 2-fold improvements on clearance and AUC were also observed from both XTEN insertions.

TABLE 17
PK parameter of heterodimers in HemA mice

| | XTEN Insertions | | T_{1/2} | MRT | Cl | Vss | AUC_D |
|---|---|---|---|---|---|---|---|
| FVIII | Insertion 1 | Insertion 2 | (hr) | (hr) | (mL/hr/kg) | (mL/kg) | (kg*hr/mL) |
| rFVIII169/VWF031 | B*-AE288 | | 16.65 | 18.44 | 3.57 | 85.72 | 0.28 |
| rFVIII205/VWF031 | B*-AE288 | A1-AE144 | 29.45 | 36.02 | 1.76 | 63.56 | 0.57 |
| rFVIII169/VWF034 | B*-AE288 | D′D3-AE288 | 31.10 | 34.57 | 1.73 | 59.77 | 0.58 |

### Example 7

### 144 aa AE-XTEN Confers Better Half-Life Benefit then 288 Aa AE-XTEN when Inserted in Between D′D3 and Fc Domains

[0347] Another heterodimer-FVIII169/VWF057 was constructed in the effort of identifying the optimal length of XTEN insertion within the D′D3-XTEN-Fc chain, in which the length of XTEN insertion was reduced to 144aa from 288aa. As shown in FIG. 4, compared to rFVIII169/VWF034, the half-life of rFVIII169/VWF057 was increased from 31 hrs to 42 hrs. Improved clearance and AUC were also observed for rFVIII169/VWF057, data was listed in Table 18. Thus, 144aa AE-XTEN insertion is more optimal than AE-288aa XTEN when inserted between D′D3 and Fc domain of the FVIII-XTEN-Fc/D′D3-XTEN-Fc heterodimers.

TABLE 18
PK parameters of rFVIII169/VWF034 and
rFVIII169/VWF057 in HemA mice

| | T_{1/2} | MRT | Cl | Vss | AUC_D |
|---|---|---|---|---|---|
| FVIII | (hr) | (hr) | (mL/hr/kg) | (mL/kg) | (kg * hr/mL) |
| rFVIII169/VWF034 | 31.10 | 34.57 | 1.73 | 59.77 | 0.58 |
| rFVIII169/VWF057 | 42.23 | 53.24 | 0.97 | 51.44 | 1.03 |

### Example 8

### Fc Domain Extents the Half-Life of Heterodimer

[0348] Fc domains extent its fusion protein's half-life through FcRn mediated recycling pathway. To confirm the necessity of the Fc domain on the half-life extension of the heterodimer, the wild-type Fc domains were replaced by a triple mutant (I253A/H310A/H435A; IHH) in rFVIII205NWF031 to form rFVIII263/VWF050, and complete elimination of FcRn binding was confirmed by Surface Plasmon Resonance (Biacore) assay for rFVIII263/VWF050. The half-life of FVIII263NWF050 was evaluated in HemA mice in comparison with rFVIII205/VWF031. Increased clearance rate, as well as reduced half-life and AUC were observed for rFVIII263NWF050 as shown in FIG. 5 and Table 19. This result demonstrated that in addition to ensure the covalent binding of FVIII and D′D3, the Fc domains is also necessary for the half-life improvement of the heterodimer

TABLE 19
PK parameters of rFVIII205/VWF031 and rFVIII263/VWF040 in HemA mice

| | Mutation in | T_{1/2} | MRT | Cl | Vss | AUC_D |
|---|---|---|---|---|---|---|
| FVIII | Fc domain | (hr) | (hr) | (mL/hr/kg) | (mL/kg) | (kg*hr/mL) |
| rFVIII205/VWF031 | None | 29.45 | 36.02 | 1.76 | 63.56 | 0.57 |
| rFVIII263/VWF050 | IHH | 22.96 | 26.15 | 2.36 | 61.69 | 0.42 |

### Example 9

### Acute Efficacy of FVIII-XTEN-Fc/D′D3-XTEN-Fc Heterodimers in HemA Mouse Tail Clip Bleeding Model

[0349] The acute efficacy of lead heterodimer candidates were evaluated using HemA mouse tail clip bleeding model.

[0350] 8-12 weeks old male HemA mice were randomized into 4 treatment groups, and treated with a single intravenous administration of SQ BDD-FVIII, rFVIII169/VWF034, rFVIII169/VWF057 or vehicle solution respectively. In order to mimic the episodic treatment of FVIII (to reconstitute 50-100% of normal FVIII plasma level), the selected FVIII treatment dose is 75 IU/kg as measured by FVIII aPTT activity. At this dose level, all testing FVIII variants will reconstitute ˜70% of normal murine plasma FVIII activity 5 min post dosing.

[0351] Blood loss volume from each individual animal in the study was plotted in FIG. 6. Significant reduction on blood loss volume was observed for all FVIII treatment groups compared to vehicle treated animals. Within the three FVIII treatment groups, no statistical significant different were found on blood loss reduction, suggesting the heterodimer molecules could potentially as efficacious as SQ BDD-FVIII for on demand treatment.

[0352] Blood loss volume from each individual animal in the study was plotted in FIG. 6. Significant reduction on blood loss volume was observed for all FVIII treatment groups compared to vehicle treated animals. Within the three FVIII treatment groups, no statistical significant different were found on blood loss reduction, suggesting the heterodimer molecules could potentially as efficacious as SQ BDD-FVIII for on demand treatment.

[0353] In addition, HemA mice were treated with a lower dose (37.5 IU/kg) of rBDD-FVIII or rFVIII169/VWF034, and the results are shown in FIG. 6B. Same as the 75 IU/kg dose, rFVIII169NWF034 provided similar protection as BDD-FVIII to HemA mice post tail clip injury, indicating the molecule was still efficacious to treat severe bleeding episodes at ˜35% of normal murine circulating FVIII level in HemA mice.

[0354] The Tail Clip procedure was carried out as follows. Briefly, mice were anesthetized with a 50 mg/kg Ketamine/0.5 mg/kg Dexmedetomidine cocktail prior to tail injury and placed on a 37° C. heating pad to help maintain the body temperature. The tails of the mice were then be immersed in 37′C saline for 10 minutes to dilate the lateral vein. After vein dilation, FVIII variants or vehicle solution were injected via the tail vein and the distal 5 mm of the tail was then cut off using a straight edged #11 scalpel 5 min post dosing. The shed blood was collected into 13 ml of 37′C saline for 30 minutes and blood loss volume was determined by the weight change of the blood collection tube: blood loss volume=(collection tube end weight−beginning weight+0.10) ml. Statistical analysis were conducted using t test (Mann Whitney test) and one way ANOVA (KRUSKAL-Wallis test, posttest: Dunns multiple comparison test).

### Example 10

### Prophylactic Efficacy of FVIII-XTEN-Fc/D′D3-XTEN-Fc Heterodimer in HemA Mouse Tail Vein Transection Bleeding Model

[0355] The prophylactic efficacy of FVIII169/VWF057 was tested in HemA mouse tail vein transection (TVT) model. The TVT model induces bleeding by introducing injury to the lateral vein of the mouse tail, which mimics the spontaneous bleeding episodes in patients with hemophilia bleeding disorder.

[0356] 8-10 weeks old male HemA mice were randomized into four treatment groups, and treated with either FVIII169/VWF057 at 72 hr prior of the tail vein injury, or SQ BDD-FVIII at 24 hr or 48 hr before the injury. Vehicle treated animal were used as negative control. Events of re-bleeding or euthanasia due to the excessive blood loss within 24 hrs post injury were plotted in FIG. 7.

[0357] As shown in FIG. 7, unlike mice treated with SQ BDD-FVIII at 48 hr prior to TVT, of whom only limited protection was observed post injury, mice that received rFVIII169NWF057 at 72 hr prior the tail injury had similar protection on re-bleeding and survival compared to the mice that received SQ BDD-FVIII treatment 24 hr before TVT, indicating rFVIII169/VWF057 can provide at least 3-fold or more (e.g., 4-fold) longer-protection to HemA mice in TVT model. Therefor rFVIII169NWF057 might significantly reduce the treatment frequency of the current FVIII prophylaxis.

[0358] Similarly, HemA mice were treated with FVIII-XTEN-Fc/D′D3-XTEN-Fc heterodimers: rFVIII169/VWF034 and rFVIII169/VWF057. at 24 or 96 hours prior to the tail vein injury. The rebleeding and survival data of the treatments were compared with the data by the rBDD-FVIII at 24 or 48 hour prior to the injury and vehicle. While the rebleeding in mice treated with rBDD-FVIII at 24 hours prior to the tail vein injury was similar to the mice treated with vehicle, the rebleeding data of mice treated with the heterodimers at 24 hr before the injury are significantly better than the vehicle treatment group. Furthermore, the rebleeding data of mice treated with the heterodimers at 96 hr before the injury were comparable to mice received rBDD-FVIII at 24 hr before the injury. As for the survival rate at 24 hr post the TVT injury, in contrast of the less than 50% survival rate of mice treated with rBDD-FVIII, more than 90% of the mice survived the TVT injury with FVIII-XTEN-Fc/D′D3-XTEN-Fc heterodimers treatment when FVIII molecules were administered at 24 hr before the injury. In addition, the survival in mice treated with the FVIII-XTEN-Fc/D′D3-XTEN-Fc heterodimers at 96 hours prior to the tail vein injury were better (in the case of rFVIII169/VWF034) or comparable (in the case of rFVIII169/VWF057) when compared with the mice that received rBDD-FVIII treatment at 24 hours prior to the injury. Both rebleeding and survival data had indicated a 4-fold efficacy prolongation of FVIII-XTEN-Fc/D′D3-XTEN-Fc heterodimer treatment vs. rBDD-FVIII treatment.

### HemA Mouse Tail Vein Transection Model

[0359] The tail vein transection procedure was conducted as follows. Mice were anesthetized with a cocktail containing 50 mg/kg of Ketamine, 0.125 mg/kg of Dexmedetomidine, and 0.1 mg/kg of Buprenex. At an adequate anesthetic depth, the lateral tail vein of the mice was transected with straight edged number 11 surgical blade at an area where the diameter of the tail is approximately 2.7 mm. The shedding blood was washed away with warm saline to ensure clear observation of the wound. The treated mice were then single housed in a clean cage with white paper bedding for the next 24 hours. Tail re-bleed and the mouse's physical activity were observed and recorded hourly up to 12 hour post tail injury. Moribund mice were euthanized immediately, and a final observation was performed at 24 hour post tail injury. To mimic the bleeding situation in hemophilia patients and to ensure the animal's completely recovery from anesthesia, 1 mg/kg of Atipamezole solution was given to reverse Dexmedetomidine effect at the beginning of the Tail Vein Transection. An additional dose of 0.1 mg/kg Buprenex was administered at the end of the 12 hour observation period for overnight pain management. The survival curve of Time to Re-bleed and Time to Euthanasia was generated for data analysis, and Log-rank (Mantel-COX) test was used for statistic evaluation.

### Example 11

### Preparation of FVIII169/VWF059 and Other Constructs

[0360] pSYN FVIII 310 Cloning:

[0361] A synthetic DNA fragment flanked with BamH1 site at the N-terminus and Cla 1 site at the C-terminus was commercially made. This synthetic DNA was used to replace the BamH1 to Cla 1 region in pSYN FVIII 169 construct (SEQ ID NO: 155). Both synthetic DNA and pSYN FVIII 169 DNA were double digested with BamH1 and Cla1, digested synthetic DNA was inserted into digested pSYN FVIII 169 to create pSYN FVIII 310 (SEQ ID NO:168; Table 20).

Cloning pSYN FVIII 312:

[0362] A synthetic DNA fragment flanked with BamH1 site at the N-terminus and Afe 1 site at the C-terminus was commercially made. This synthetic DNA was used to replace the BamH1 to Afe1 region in pSYN FVIII 169 construct (SEQ ID NO: 155). Both synthetic DNA and pSYN FVIII 169 DNA were double digested with BamH1 and Afe1, digested synthetic DNA was inserted into digested pSYN FVIII 169 to create pSYN FVIII 312 (SEQ ID NO: 169; Table 20). pSYN FVIII 312A (SEQ ID NO: 2; Table 20) was created from pSYN FVIII312 to remove AscI site which codes for amino acid residues GAP at the junction of FVIII and XTEN.

TABLE 20
Synthetic FVIII constructs.

| Construct | Protein Sequence |
|---|---|
| pSYN FVIII 169 | PRSFSQNGAPGTSESATPESGPGSEPATSGSETPGTSESATPESGPGSEPATSGS |
| | ETPGTSESATPESGPGTSTEPSEGSAPGSPAGSPTSTEEGTSESATPESGPGSEP |
| | ATSGSETPGTSESATPESGPGSPAGSPTSTEEGSPAGSPTSTEEGTSTEPSEGSA |
| | PGTSESATPESGPGTSESATPESGPGTSESATPESGPGSEPATSGSETPGSEPAT |
| | SGSETPGSPAGSPTSTEEGTSTEPSEGSAPGTSTEPSEGSAPGSEPATSGSETPG |
| | TSESATPESGPGTSTEPSEGSAPASSPPVLKRHQAEITR (SEQ ID NO: 167) |
| | (Underlined = XTEN residues; not underlined = FVIII residues) |
| pSYN FVIII 310 | PRSFGAPGTSESATPESGPGSEPATSGSETPGTSESATPESGPGSEPATSGSETP |
| | GTSESATPESGPGTSTEPSEGSAPGSPAGSPTSTEEGTSESATPESGPGSEPATS |
| | GSETPGTSESATPESGPGSPAGSPTSTEEGSPAGSPTSTEEGTSTEPSEGSAPGT |
| | SESATPESGPGTSESATPESGPGTSESATPESGPGSEPATSGSETPGSEPATSGS |
| | ETPGSPAGSPTSTEEGTSTEPSEGSAPGTSTEPSEGSAPGSEPATSGSETPGTSE |
| | SATPESGPGTSTEPSEGSAPASSEITR (SEQ ID NO: 168) |
| | (Underlined = XTEN residues; not underlined = FVIII residues) |
| pSYN FVIII 312 | PRSFSQNGAPGTSESATPESGPGSEPATSGSETPGTSESATPESGPGSEPATSGS |
| | ETPGTSESATPESGPGTSTEPSEGSAPGSPAGSPTSTEEGTSESATPESGPGSEP |
| | ATSGSETPGTSESATPESGPGSPAGSPTSTEEGSPAGSPTSTEEGTSTEPSEGSA |
| | PGTSESATPESGPGTSESATPESGPGTSESATPESGPGSEPATSGSETPGSEPAT |
| | SGSETPGSPAGSPTSTEEGTSTEPSEGSAPGTSTEPSEGSAPGSEPATSGSETPG |
| | TSESATPESGPGTSTEPSEGSAPASSEITR (SEQ ID NO: 169) |
| | (Underlined = XTEN residues; not underlined = FVIII residues) |
| pSYN FVIII | PRSFSQNGTSESATPESGPGSEPATSGSETPGTSESATPESGPGSEPATSGSETP |
| 312A | GTSESATPESGPGTSTEPSEGSAPGSPAGSPTSTEEGTSESATPESGPGSEPATS |
| | GSETPGTSESATPESGPGSPAGSPTSTEEGSPAGSPTSTEEGTSTEPSEGSAPGT |
| | SESATPESGPGTSESATPESGPGTSESATPESGPGSEPATSGSETPGSEPATSGS |
| | ETPGSPAGSPTSTEEGTSTEPSEGSAPGTSTEPSEGSAPGSEPATSGSETPGTSE |
| | SATPESGPGTSTEPSEGSAPASSEITR (SEQ ID NO: 2) |
| | (similar sequence as pSYNFVIII312 just residues corresponding |
| | to AscI site i.e GAP are removed) (Underlined = XTEN |
| | residues; not underlined = FVIII residues) |

Cloning pSYN VWF059 and VWF073:

[0363] Various synthetic DNA fragments coding for different linker regions between D′D3-XTEN and Fc were made. These synthetic DNA fragments were flanked with Asc1 site at N-terminus and Not 1 site at the C-terminus. These synthetic DNAs were used to replace the Asc1 to Not1 region in pSYN VWF057 construct (SEQ ID NO: 152). The pSYN VWF059 construct (Table 21) comprises a linker region (SEQ ID NO: 13), which includes the entire FVIII acidic region 2 (a2). This site is reported to be cleaved by thrombin, and upon FVIII activation D′D3XTEN is released. The pSYN VWF073 construct (Table 21) contains only the thrombin cleavage site of FVIII acidic region 2 (a2) (i.e., IEPRSFS) (SEQ ID NO: 23). Both synthetic DNA and pSYN VWF057 DNA were double digested with Asc1 and Not1. Digested synthetic DNA was inserted into digested pSYN VWF057 to create pSYN VWF059 and pSYN VWF073. The pSYN VWF59A construct (Table 21) was generated from pSYN VWF059 by removing the EcoRV restriction site. FVIII169/VWF057 and FVIII169/VWF059 heterodimer proteins were generated by co-expression of FVIII169 and VWF057 or VWF059 in HEK293 cells.

### Example 12

### Thrombin Digestion of FVIII Heterodimer to Analyze the Release of D′D3 from Fc

[0364] Two FVIII heterodimer proteins were tested in thrombin digestion experiments and their rate of cleavage by thrombin was examined. The two heterodimer constructs used in this experiment were FVIII169NWF057 heterodimer and FVIII169/VWF059 heterodimer along with FVIIIFc. The FVIII169NWF057 and FVIII169NWF059 heterodimers are described above. Three digestion reactions were carried out: i) FVIIIFc ii) FVIII169/VWF057 (FIG. 11), and iii) FVIII 169/VWF059 (FIG. 12). Test samples were treated with human α-thrombin at a molar ratio if FVIII:thrombin of approximately 22:1. Each reaction was incubated in a 37° C. water bath. At each indicated time point (t=5, 15, 30, 45, 60 minutes), a 22.5 μL sample was withdrawn, stopped with 22.5 μL non-reducing 2x SDS loading dye, and heated for 3 minutes. The digested protein was then run on an SDS-PAGE gel. Western blotting was performed using anti-FVIII heavy chain (GMA012) and anti-VWF-D3 (Ab96340) antibodies using a LICOR system.

[0365] As shown in FIG. 11, exposure of FVIII169/VWF057 to thrombin resulted in a gradual decrease in the detected level of D′D3-XTEN-Fc, correlating with an increase in the level of D′D3-144 XTEN, the cleaved product. Un-cleaved FVIII169/VWF057 remained after 15 minutes. Conversely, FIG. 12 shows that FVIII 169/VWF059 is cleaved more rapidly by thrombin, as evidenced by little to no detectable un-cleaved FVIII 169/VWF059 after 5 minutes. Accordingly, FVIII 169/VWF059 showed better release of D′D3 from Fc upon thrombin activation as compared or FVIII169/VWF057.

[0366] Parallel experiments were done to investigate thrombin cleavage using mass spectroscopy (MS). By MS, FVIII 169NWF059 again showed better release of D′D3 from Fc as compared to VWF057.

### Example 13

### In Vivo Evaluation of FVIII169/VWF059 in HemA Mice

[0367] To further evaluate the pharmacokinetic profile and in vivo potency of FVIII169/VWF059, HemA mice were treated with FVIII169/VWF059 through intravenous administration at 150 IU/kg dose. Plasma samples were collected via vena cava blood collection at 5 minutes, 24, 48, 72, 96 and 120 hours post injection. FVIII activity in plasma samples were measured by FVIII chromogenic assay and PK parameters were calculated using Phoenix program. A similar PK profile of FVIII169/VWF059 was observed in comparison with FVIII169/VWF057, as shown in Table 22, indicating that the a2 thrombin cleavage linker has no negative effect on the PK profile of the heterodimer

TABLE 22
PK profile of FVIII169/VWF057 and FVIII169/VWF059 in HemA mice

| | | AUC/D | Cl | | |
|---|---|---|---|---|---|
| | T_{1/2} | (hr * kg * | (mL/ | MRT | Vss |
| Heterodimer | (hr) | mIU/mL/mIU) | hr/kg) | (hr) | (mL/kg) |
| FVIII169/VWF057 | 38.53 | 0.80 | 1.26 | 44.92 | 56.38 |
| FVIII169/VWF059 | 40.51 | 0.74 | 1.35 | 49.22 | 66.26 |

[0368] The acute efficacy of FVIII169NWF059 was evaluated in a HemA mouse tail clip model (described in Example 9) in comparison with wild type BDD-FVIII. HemA mice were treated with 75 IU/kg of either FVIII169/VWF059 or BDD-FVIII, and blood loss volume of each experimental mouse was plotted in FIG. 13. Compared to BDD-FVIII, FVIII169/VWF059 provided the same degree of protection to HemA mice (p=0.9883), indicating that FVIII169/VWF059 is fully functional in vivo.

### Plasmid Construction of FVIII-XTEN-Fc/D′D3-Fc Heterodimers

### VWF031 Nucleotide Sequence (SEQ ID NO: 147)

| | |
|---|---|
| 1 | ATGAT TCCTG CCAGA TTTGC CGGGG TGCTG CTTGC TCTGG CCCTC ATTTT |
| 51 | GCCAG GGACC CTTTG TGCAG AAGGA ACTCG CGGCA GGTCA TCCAC GGCCC |
| 101 | GATGC AGCCT TTTCG GAAGT GACTT CGTCA ACACC TTTGA TGGGA GCATG |
| 151 | TACAG CTTTG CGGGA TACTG CAGTT ACCTC CTGGC AGGGG GCTGC CAGAA |
| 201 | ACGCT CCTTC TCGAT TATTG GGGAC TTCCA GAATG GCAAG AGAGT GAGCC |
| 251 | TCTCC GTGTA TCTTG GGGAA TTTTT TGACA TCCAT TTGTT TGTCA ATGGT |
| 301 | ACCGT GACAC AGGGG GACCA AAGAG TCTCC ATGCC CTATG CCTCC AAAGG |
| 351 | GCTGT ATCTA GAAAC TGAGG CTGGG TACTA CAAGC TGTCC GGTGA GGCCT |
| 401 | ATGGC TTTGT GGCCA GGATC GATGG CAGCG GCAAC TTTCA AGTCC TGCTG |
| 451 | TCAGA CAGAT ACTTC AACAA GACCT GCGGG CTGTG TGGCA ACTTT AACAT |
| 501 | CTTTG CTGAA GATGA CTTTA TGACC CAAGA AGGGA CCTTG ACCTC GGACC |
| 551 | CTTAT GACTT TGCCA ACTCA TGGGC TCTGA GCAGT GGAGA ACAGT GGTGT |
| 601 | GAACG GGCAT CTCCT CCCAG CAGCT CATGC AACAT CTCCT CTGGG GAAAT |
| 651 | GCAGA AGGGC CTGTG GGAGC AGTGC CAGCT TCTGA AGAGC ACCTC GGTGT |
| 701 | TTGCC CGCTG CCACC CTCTG GTGGA CCCCG AGCCT TTTGT GGCCC TGTGT |
| 751 | GAGAA GACTT TGTGT GAGTG TGCTG GGGGG CTGGA GTGCG CCTGC CCTGC |
| 801 | CCTCC TGGAG TACGC CCGGA CCTGT GCCCA GGAGG GAATG GTGCT GTACG |
| 851 | GCTGG ACCGA CCACA GCGCG TGCAG CCCAG TGTGC CCTGC TGGTA TGGAG |
| 901 | TATAG GCAGT GTGTG TCCCC TTGCG CCAGG ACCTG CCAGA GCCTG CACAT |
| 951 | CAATG AAATG TGTCA GGAGC GATGC GTGGA TGGCT GCAGC TGCCC TGAGG |
| 1001 | GACAG CTCCT GGATG AAGGC CTCTG CGTGG AGAGC ACCGA GTGTC CCTGC |
| 1051 | GTGCA TTCCG GAAAG CGCTA CCCTC CCGGC ACCTC CCTCT CTCGA GACTG |
| 1101 | CAACA CCTGC ATTTG CCGAA ACAGC CAGTG GATCT GCAGC AATGA AGAAT |
| 1151 | GTCCA GGGGA GTGCC TTGTC ACTGG TCAAT CCCAC TTCAA GAGCT TTGAC |
| 1201 | AACAG ATACT TCACC TTCAG TGGGA TCTGC CAGTA CCTGC TGGCC CGGGA |
| 1251 | TTGCC AGGAC CACTC CTTCT CCATT GTCAT TGAGA CTGTC CAGTG TGCTG |
| 1301 | ATGAC CGCGA CGCTG TGTGC ACCCG CTCCG TCACC GTCCG GCTGC CTGGC |
| 1351 | CTGCA CAACA GCCTT GTGAA ACTGA AGCAT GGGGC AGGAG TTGCC ATGGA |
| 1401 | TGGCC AGGAC ATCCA GCTCC CCCTC CTGAA AGGTG ACCTC CGCAT CCAGC |
| 1451 | ATACA GTGAC GGCCT CCGTG CGCCT CAGCT ACGGG GAGGA CCTGC AGATG |
| 1501 | GACTG GGATG GCCGC GGGAG GCTGC TGGTG AAGCT GTCCC CCGTC TATGC |
| 1551 | CGGGA AGACC TGCGG CCTGT GTGGG AATTA CAATG GCAAC CAGGG CGACG |
| 1601 | ACTTC CTTAC CCCCT CTGGG CTGGC GGAGC CCCGG GTGGA GGACT TCGGG |
| 1651 | AACGC CTGGA AGCTG CACGG GGACT GCCAG GACCT GCAGA AGCAG CACAG |
| 1701 | CGATC CCTGC GCCCT CAACC CGCGC ATGAC CAGGT TCTCC GAGGA GGCGT |
| 1751 | GCGCG GTCCT GACGT CCCCC ACATT CGAGG CCTGC CATCG TGCCG TCAGC |
| 1801 | CCGCT GCCCT ACCTG CGGAA CTGCC GCTAC GACGT GTGCT CCTGC TCGGA |
| 1851 | CGGCC GCGAG TGCCT GTGCG GCGCC CTGGC CAGCT ATGCC GCGGC CTGCG |
| 1901 | CGGGG AGAGG CGTGC GCGTC GCGTG GCGCG AGCCA GGCCG CTGTG AGCTG |
| 1951 | AACTG CCCGA AAGGC CAGGT GTACC TGCAG TGCGG GACCC CCTGC AACCT |
| 2001 | GACCT GCCGC TCTCT CTCTT ACCCG GATGA GGAAT GCAAT GAGGC CTGCC |
| 2051 | TGGAG GGCTG CTTCT GCCCC CCAGG GCTCT ACATG GATGA GAGGG GGGAC |
| 2101 | TGCGT GCCCA AGGCC CAGTG CCCCT GTTAC TATGA CGGTG AGATC TTCCA |
| 2151 | GCCAG AAGAC ATCTT CTCAG ACCAT CACAC CATGT GCTAC TGTGA GGATG |
| 2201 | GCTTC ATGCA CTGTA CCATG AGTGG AGTCC CCGGA AGCTT GCTGC CTGAC |
| 2251 | GCTGT CCTCA GCAGT CCCCT GTCTC ATCGC AGCAA AAGGA GCCTA TCCTG |
| 2301 | TCGGC CCCCC ATGGT CAAGC TGGTG TGTCC CGCTG ACAAC CTGCG GGCTG |
| 2351 | AAGGG CTCGA GTGTA CCAAA ACGTG CCAGA ACTAT GACCT GGAGT GCATG |
| 2401 | AGCAT GGGCT GTGTC TCTGG CTGCC TCTGC CCCCC GGGCA TGGTC CGGCA |
| 2451 | TGAGA ACAGA TGTGT GGCCC TGGAA AGGTG TCCCT GCTTC CATCA GGGCA |
| 2501 | AGGAG TATGC CCCTG GAGAA ACAGT GAAGA TTGGC TGCAA CACTT GTGTC |
| 2551 | TGTCG GGACC GGAAG TGGAA CTGCA CAGAC CATGT GTGTG ATGCC ACGTG |
| 2601 | CTCCA CGATC GGCAT GGCCC ACTAC CTCAC CTTCG ACGGG CTCAA ATACC |
| 2651 | TGTTC CCCGG GGAGT GCCAG TACGT TCTGG TGCAG GATTA CTGCG GCAGT |
| 2701 | AACCC TGGGA CCTTT CGGAT CCTAG TGGGG AATAA GGGAT GCAGC CACCC |
| 2751 | CTCAG TGAAA TGCAA GAAAC GGGTC ACCAT CCTGG TGGAG GGAGG AGAGA |
| 2801 | TTGAG CTGTT TGACG GGGAG GTGAA TGTGA AGAGG CCCAT GAAGG ATGAG |
| 2851 | ACTCA CTTTG AGGTG GTGGA GTCTG GCCGG TACAT CATTC TGCTG CTGGG |
| 2901 | CAAAG CCCTC TCCGT GGTCT GGGAC CGCCA CCTGA GCATC TCCGT GGTCC |
| 2951 | TGAAG CAGAC ATACC AGGAG AAAGT GTGTG GCCTG TGTGG GAATT TTGAT |
| 3001 | GGCAT CCAGA ACAAT GACCT CACCA GCAGC AACCT CCAAG TGGAG GAAGA |
| 3051 | CCCTG TGGAC TTTGG GAACT CCTGG AAAGT GAGCT CGCAG TGTGC TGACA |
| 3101 | CCAGA AAAGT GCCTC TGGAC TCATC CCCTG CCACC TGCCA TAACA ACATC |
| 3151 | ATGAA GCAGA CGATG GTGGA TTCCT CCTGT AGAAT CCTTA CCAGT GACGT |
| 3201 | CTTCC AGGAC TGCAA CAAGC TGGTG GACCC CGAGC CATAT CTGGA TGTCT |
| 3251 | GCATT TACGA CACCT GCTCC TGTGA GTCCA TTGGG GACTG CGCCG CATTC |
| 3301 | TGCGA CACCA TTGCT GCCTA TGCCC ACGTG TGTGC CCAGC ATGGC AAGGT |
| 3351 | GGTGA CCTGG AGGAC GGCCA CATTG TGCCC CCAGA GCTGC GAGGA GAGGA |
| 3401 | ATCTC CGGGA GAACG GGTAT GAGGC TGAGT GGCGC TATAA CAGCT GTGCA |
| 3451 | CCTGC CTGTC AAGTC ACGTG TCAGC ACCCT GAGCC ACTGG CCTGC CCTGT |
| 3501 | GCAGT GTGTG GAGGG CTGCC ATGCC CACTG CCCTC CAGGG AAAAT CCTGG |
| 3551 | ATGAG CTTTT GCAGA CCTGC GTTGA CCCTG AAGAC TGTCC AGTGT GTGAG |
| 3601 | GTGGC TGGCC GGCGT TTTGC CTCAG GAAAG AAAGT CACCT TGAAT CCCAG |
| 3651 | TGACC CTGAG CACTG CCAGA TTTGC CACTG TGATG TTGTC AACCT CACCT |
| 3701 | GTGAA GCCTG CCAGG AGCCG ATATC TGGCG GTGGA GGTTC CGGTG GCGGG |
| 3751 | GGATC CGGCG GTGGA GGTTC CGGCG GTGGA GGTTC CGGTG GCGGG GGATC |
| 3801 | CGGTG GCGGG GGATC CCTGG TCCCC CGGGG CAGCG GCGGT GGAGG TTCCG |
| 3851 | GTGGC GGGGG ATCCG ACAAA ACTCA CACAT GCCCA CCGTG CCCAG CTCCA |
| 3901 | GAACT CCTGG GCGGA CCGTC AGTCT TCCTC TTCCC CCCAA AACCC AAGGA |
| 3951 | CACCC TCATG ATCTC CCGGA CCCCT GAGGT CACAT GCGTG GTGGT GGACG |
| 4001 | TGAGC CACGA AGACC CTGAG GTCAA GTTCA ACTGG TACGT GGACG GCGTG |
| 4051 | GAGGT GCATA ATGCC AAGAC AAAGC CGCGG GAGGA GCAGT ACAAC AGCAC |
| 4101 | GTACC GTGTG GTCAG CGTCC TCACC GTCCT GCACC AGGAC TGGCT GAATG |
| 4151 | GCAAG GAGTA CAAGT GCAAG GTCTC CAACA AAGCC CTCCC AGCCC CCATC |
| 4201 | GAGAA AACCA TCTCC AAAGC CAAAG GGCAG CCCCG AGAAC CACAG GTGTA |
| 4251 | CACCC TGCCC CCATC CCGCG ATGAG CTGAC CAAGA ACCAG GTCAG CCTGA |
| 4301 | CCTGC CTGGT CAAAG GCTTC TATCC CAGCG ACATC GCCGT GGAGT GGGAG |
| 4351 | AGCAA TGGGC AGCCG GAGAA CAACT ACAAG ACCAC GCCTC CCGTG TTGGA |
| 4401 | CTCCG ACGGC TCCTT CTTCC TCTAC AGCAA GCTCA CCGTG GACAA GAGCA |
| 4451 | GGTGG CAGCA GGGGA ACGTC TTCTC ATGCT CCGTG ATGCA TGAGG CTCTG |
| 4501 | CACAA CCACT ACACG CAGAA GAGCC TCTCC CTGTC TCCGG GTAAA TGA |

### VWF031 Protein Sequence (SEQ ID NO: 86)

| | |
|---|---|
| 1 | MIPARFAGVL LALALILPGT LCAEGTRGRS STARCSLFGS DFVNTFDGSM |
| 51 | YSFAGYCSYL LAGGCQKRSF SIIGDFQNGK RVSLSVYLGE FFDIHLFVNG |
| 101 | TVTQGDQRVS MPYASKGLYL ETEAGYYKLS GEAYGFVARI DGSGNFQVLL |
| 151 | SDRYFNKTCG LCGNFNIFAE DDFMTQEGTL TSDPYDFANS WALSSGEQWC |
| 201 | ERASPPSSSC NISSGEMQKG LWEQCQLLKS TSVFARCHPL VDPEPFVALC |
| 251 | EKTLCECAGG LECACPALLE YARTCAQEGM VLYGWTDHSA CSPVCPAGME |
| 301 | YRQCVSPCAR TCQSLHINEM CQERCVDGCS CPEGQLLDEG LCVESTECPC |
| 351 | VHSGKRYPPG TSLSRDCNTC ICRNSQWICS NEECPGECLV TGQSHFKSFD |
| 401 | NRYFTFSGIC QYLLARDCQD HSFSIVIETV QCADDRDAVC TRSVTVRLPG |
| 451 | LHNSLVKLKH GAGVAMDGQD IQLPLLKGDL RIQHTVTASV RLSYGEDLQM |
| 501 | DWDGRGRLLV KLSPVYAGKT CGLCGNYNGN QGDDFLTPSG LAEPRVEDFG |
| 551 | NAWKLHGDCQ DLQKQHSDPC ALNPRMTRFS EEACAVLTSP TFEACHRAVS |
| 601 | PLPYLRNCRY DVCSCSDGRE CLCGALASYA AACAGRGVRV AWREPGRCEL |
| 651 | NCPKGQVYLQ CGTPCNLTCR SLSYPDEECN EACLEGCFCP PGLYMDERGD |
| 701 | CVPKAQCPCY YDGEIFQPED IFSDHHTMCY CEDGFMHCTM SGVPGSLLPD |
| 751 | AVLSSPLSHR SKRSLSCRPP MVKLVCPADN LRAEGLECTK TCQNYDLECM |
| 801 | SMGCVSGCLC PPGMVRHENR CVALERCPCF HQGKEYAPGE TVKIGCNTCV |
| 851 | CRDRKWNCTD HVCDATCSTI GMAHYLTFDG LKYLFPGECQ YVLVQDYCGS |
| 901 | NPGTFRILVG NKGCSHPSVK CKKRVTILVE GGEIELFDGE VNVKRPMKDE |
| 951 | THFEVVESGR YIILLLGKAL SVVWDRHLSI SVVLKQTYQE KVCGLCGNFD |
| 1001 | GIQNNDLTSS NLQVEEDPVD FGNSWKVSSQ CADTRKVPLD SSPATCHNNI |
| 1051 | MKQTMVDSSC RILTSDVFQD CNKLVDPEPY LDVCIYDTCS CESIGDCAAF |
| 1101 | CDTIAAYAHV CAQHGKVVTW RTATLCPQSC EERNLRENGY EAEWRYNSCA |
| 1151 | PACQVTCQHP EPLACPVQCV EGCHAHCPPG KILDELLQTC VDPEDCPVCE |
| 1201 | VAGRRFASGK KVTLNPSDPE HCQICHCDVV NLTCEACQEP ISGGGGSGGG |
| 1251 | GSGGGGSGGG GSGGGGSGGG GSLVPRGSGG GGSGGGGSDK THTCPPCPAP |
| 1301 | ELLGGPSVFL FPPKPKDTLM ISRTPEVTCV VVDVSHEDPE VKFNWYVDGV |
| 1351 | EVHNAKTKPR EEQYNSTYRV VSVLTVLHQD WLNGKEYKCK VSNKALPAPI |
| 1401 | EKTISKAKGQ PREPQVYTLP PSRDELTKNQ VSLTCLVKGF YPSDIAVEWE |
| 1451 | SNGQPENNYK TTPPVLDSDG SFFLYSKLTV DKSRWQQGNV FSCSVMHEAL |
| 1501 | HNHYTQKSLS LSPGK* |

### VWF034 Nucleotide Sequence (SEQ ID NO: 148)

| | |
|---|---|
| 1 | ATGAT TCCTG CCAGA TTTGC CGGGG TGCTG CTTGC TCTGG CCCTC ATTTT |
| 51 | GCCAG GGACC CTTTG TGCAG AAGGA ACTCG CGGCA GGTCA TCCAC GGCCC |
| 101 | GATGC AGCCT TTTCG GAAGT GACTT CGTCA ACACC TTTGA TGGGA GCATG |
| 151 | TACAG CTTTG CGGGA TACTG CAGTT ACCTC CTGGC AGGGG GCTGC CAGAA |
| 201 | ACGCT CCTTC TCGAT TATTG GGGAC TTCCA GAATG GCAAG AGAGT GAGCC |
| 251 | TCTCC GTGTA TCTTG GGGAA TTTTT TGACA TCCAT TTGTT TGTCA ATGGT |
| 301 | ACCGT GACAC AGGGG GACCA AAGAG TCTCC ATGCC CTATG CCTCC AAAGG |
| 351 | GCTGT ATCTA GAAAC TGAGG CTGGG TACTA CAAGC TGTCC GGTGA GGCCT |
| 401 | ATGGC TTTGT GGCCA GGATC GATGG CAGCG GCAAC TTTCA AGTCC TGCTG |
| 451 | TCAGA CAGAT ACTTC AACAA GACCT GCGGG CTGTG TGGCA ACTTT AACAT |
| 501 | CTTTG CTGAA GATGA CTTTA TGACC CAAGA AGGGA CCTTG ACCTC GGACC |
| 551 | CTTAT GACTT TGCCA ACTCA TGGGC TCTGA GCAGT GGAGA ACAGT GGTGT |
| 601 | GAACG GGCAT CTCCT CCCAG CAGCT CATGC AACAT CTCCT CTGGG GAAAT |
| 651 | GCAGA AGGGC CTGTG GGAGC AGTGC CAGCT TCTGA AGAGC ACCTC GGTGT |
| 701 | TTGCC CGCTG CCACC CTCTG GTGGA CCCCG AGCCT TTTGT GGCCC TGTGT |
| 751 | GAGAA GACTT TGTGT GAGTG TGCTG GGGGG CTGGA GTGCG CCTGC CCTGC |
| 801 | CCTCC TGGAG TACGC CCGGA CCTGT GCCCA GGAGG GAATG GTGCT GTACG |
| 851 | GCTGG ACCGA CCACA GCGCG TGCAG CCCAG TGTGC CCTGC TGGTA TGGAG |
| 901 | TATAG GCAGT GTGTG TCCCC TTGCG CCAGG ACCTG CCAGA GCCTG CACAT |
| 951 | CAATG AAATG TGTCA GGAGC GATGC GTGGA TGGCT GCAGC TGCCC TGAGG |
| 1001 | GACAG CTCCT GGATG AAGGC CTCTG CGTGG AGAGC ACCGA GTGTC CCTGC |
| 1051 | GTGCA TTCCG GAAAG CGCTA CCCTC CCGGC ACCTC CCTCT CTCGA GACTG |
| 1101 | CAACA CCTGC ATTTG CCGAA ACAGC CAGTG GATCT GCAGC AATGA AGAAT |
| 1151 | GTCCA GGGGA GTGCC TTGTC ACTGG TCAAT CCCAC TTCAA GAGCT TTGAC |
| 1201 | AACAG ATACT TCACC TTCAG TGGGA TCTGC CAGTA CCTGC TGGCC CGGGA |
| 1251 | TTGCC AGGAC CACTC CTTCT CCATT GTCAT TGAGA CTGTC CAGTG TGCTG |
| 1301 | ATGAC CGCGA CGCTG TGTGC ACCCG CTCCG TCACC GTCCG GCTGC CTGGC |
| 1351 | CTGCA CAACA GCCTT GTGAA ACTGA AGCAT GGGGC AGGAG TTGCC ATGGA |
| 1401 | TGGCC AGGAC ATCCA GCTCC CCCTC CTGAA AGGTG ACCTC CGCAT CCAGC |
| 1451 | ATACA GTGAC GGCCT CCGTG CGCCT CAGCT ACGGG GAGGA CCTGC AGATG |
| 1501 | GACTG GGATG GCCGC GGGAG GCTGC TGGTG AAGCT GTCCC CCGTC TATGC |
| 1551 | CGGGA AGACC TGCGG CCTGT GTGGG AATTA CAATG GCAAC CAGGG CGACG |
| 1601 | ACTTC CTTAC CCCCT CTGGG CTGGC GGAGC CCCGG GTGGA GGACT TCGGG |
| 1651 | AACGC CTGGA AGCTG CACGG GGACT GCCAG GACCT GCAGA AGCAG CACAG |
| 1701 | CGATC CCTGC GCCCT CAACC CGCGC ATGAC CAGGT TCTCC GAGGA GGCGT |
| 1751 | GCGCG GTCCT GACGT CCCCC ACATT CGAGG CCTGC CATCG TGCCG TCAGC |
| 1801 | CCGCT GCCCT ACCTG CGGAA CTGCC GCTAC GACGT GTGCT CCTGC TCGGA |
| 1851 | CGGCC GCGAG TGCCT GTGCG GCGCC CTGGC CAGCT ATGCC GCGGC CTGCG |
| 1901 | CGGGG AGAGG CGTGC GCGTC GCGTG GCGCG AGCCA GGCCG CTGTG AGCTG |
| 1951 | AACTG CCCGA AAGGC CAGGT GTACC TGCAG TGCGG GACCC CCTGC AACCT |
| 2001 | GACCT GCCGC TCTCT CTCTT ACCCG GATGA GGAAT GCAAT GAGGC CTGCC |
| 2051 | TGGAG GGCTG CTTCT GCCCC CCAGG GCTCT ACATG GATGA GAGGG GGGAC |
| 2101 | TGCGT GCCCA AGGCC CAGTG CCCCT GTTAC TATGA CGGTG AGATC TTCCA |
| 2151 | GCCAG AAGAC ATCTT CTCAG ACCAT CACAC CATGT GCTAC TGTGA GGATG |
| 2201 | GCTTC ATGCA CTGTA CCATG AGTGG AGTCC CCGGA AGCTT GCTGC CTGAC |
| 2251 | GCTGT CCTCA GCAGT CCCCT GTCTC ATCGC AGCAA AAGGA GCCTA TCCTG |
| 2301 | TCGGC CCCCC ATGGT CAAGC TGGTG TGTCC CGCTG ACAAC CTGCG GGCTG |
| 2351 | AAGGG CTCGA GTGTA CCAAA ACGTG CCAGA ACTAT GACCT GGAGT GCATG |
| 2401 | AGCAT GGGCT GTGTC TCTGG CTGCC TCTGC CCCCC GGGCA TGGTC CGGCA |
| 2451 | TGAGA ACAGA TGTGT GGCCC TGGAA AGGTG TCCCT GCTTC CATCA GGGCA |
| 2501 | AGGAG TATGC CCCTG GAGAA ACAGT GAAGA TTGGC TGCAA CACTT GTGTC |
| 2551 | TGTCG GGACC GGAAG TGGAA CTGCA CAGAC CATGT GTGTG ATGCC ACGTG |
| 2601 | CTCCA CGATC GGCAT GGCCC ACTAC CTCAC CTTCG ACGGG CTCAA ATACC |
| 2651 | TGTTC CCCGG GGAGT GCCAG TACGT TCTGG TGCAG GATTA CTGCG GCAGT |
| 2701 | AACCC TGGGA CCTTT CGGAT CCTAG TGGGG AATAA GGGAT GCAGC CACCC |
| 2751 | CTCAG TGAAA TGCAA GAAAC GGGTC ACCAT CCTGG TGGAG GGAGG AGAGA |
| 2801 | TTGAG CTGTT TGACG GGGAG GTGAA TGTGA AGAGG CCCAT GAAGG ATGAG |
| 2851 | ACTCA CTTTG AGGTG GTGGA GTCTG GCCGG TACAT CATTC TGCTG CTGGG |
| 2901 | CAAAG CCCTC TCCGT GGTCT GGGAC CGCCA CCTGA GCATC TCCGT GGTCC |
| 2951 | TGAAG CAGAC ATACC AGGAG AAAGT GTGTG GCCTG TGTGG GAATT TTGAT |
| 3001 | GGCAT CCAGA ACAAT GACCT CACCA GCAGC AACCT CCAAG TGGAG GAAGA |
| 3051 | CCCTG TGGAC TTTGG GAACT CCTGG AAAGT GAGCT CGCAG TGTGC TGACA |
| 3101 | CCAGA AAAGT GCCTC TGGAC TCATC CCCTG CCACC TGCCA TAACA ACATC |
| 3151 | ATGAA GCAGA CGATG GTGGA TTCCT CCTGT AGAAT CCTTA CCAGT GACGT |
| 3201 | CTTCC AGGAC TGCAA CAAGC TGGTG GACCC CGAGC CATAT CTGGA TGTCT |
| 3251 | GCATT TACGA CACCT GCTCC TGTGA GTCCA TTGGG GACTG CGCCG CATTC |
| 3301 | TGCGA CACCA TTGCT GCCTA TGCCC ACGTG TGTGC CCAGC ATGGC AAGGT |
| 3351 | GGTGA CCTGG AGGAC GGCCA CATTG TGCCC CCAGA GCTGC GAGGA GAGGA |
| 3401 | ATCTC CGGGA GAACG GGTAT GAGGC TGAGT GGCGC TATAA CAGCT GTGCA |
| 3451 | CCTGC CTGTC AAGTC ACGTG TCAGC ACCCT GAGCC ACTGG CCTGC CCTGT |
| 3501 | GCAGT GTGTG GAGGG CTGCC ATGCC CACTG CCCTC CAGGG AAAAT CCTGG |
| 3551 | ATGAG CTTTT GCAGA CCTGC GTTGA CCCTG AAGAC TGTCC AGTGT GTGAG |
| 3601 | GTGGC TGGCC GGCGT TTTGC CTCAG GAAAG AAAGT CACCT TGAAT CCCAG |
| 3651 | TGACC CTGAG CACTG CCAGA TTTGC CACTG TGATG TTGTC AACCT CACCT |
| 3701 | GTGAA GCCTG CCAGG AGCCG ATATC GGGTA CCTCA GAGTC TGCTA CCCCC |
| 3751 | GAGTC AGGGC CAGGA TCAGA GCCAG CCACC TCCGG GTCTG AGACA CCCGG |
| 3801 | GACTT CCGAG AGTGC CACCC CTGAG TCCGG ACCCG GGTCC GAGCC CGCCA |
| 3851 | CTTCC GGCTC CGAAA CTCCC GGCAC AAGCG AGAGC GCTAC CCCAG AGTCA |
| 3901 | GGACC AGGAA CATCT ACAGA GCCCT CTGAA GGCTC CGCTC CAGGG TCCCC |
| 3951 | AGCCG GCAGT CCCAC TAGCA CCGAG GAGGG AACCT CTGAA AGCGC CACAC |
| 4001 | CCGAA TCAGG GCCAG GGTCT GAGCC TGCTA CCAGC GGCAG CGAGA CACCA |
| 4051 | GGCAC CTCTG AGTCC GCCAC ACCAG AGTCC GGACC CGGAT CTCCC GCTGG |
| 4101 | GAGCC CCACC TCCAC TGAGG AGGGA TCTCC TGCTG GCTCT CCAAC ATCTA |
| 4151 | CTGAG GAAGG TACCT CAACC GAGCC ATCCG AGGGA TCAGC TCCCG GCACC |
| 4201 | TCAGA GTCGG CAACC CCGGA GTCTG GACCC GGAAC TTCCG AAAGT GCCAC |
| 4251 | ACCAG AGTCC GGTCC CGGGA CTTCA GAATC AGCAA CACCC GAGTC CGGCC |
| 4301 | CTGGG TCTGA ACCCG CCACA AGTGG TAGTG AGACA CCAGG ATCAG AACCT |
| 4351 | GCTAC CTCAG GGTCA GAGAC ACCCG GATCT CCGGC AGGCT CACCA ACCTC |
| 4401 | CACTG AGGAG GGCAC CAGCA CAGAA CCAAG CGAGG GCTCC GCACC CGGAA |
| 4451 | CAAGC ACTGA ACCCA GTGAG GGTTC AGCAC CCGGC TCTGA GCCGG CCACA |
| 4501 | AGTGG CAGTG AGACA CCCGG CACTT CAGAG AGTGC CACCC CCGAG AGTGG |
| 4551 | CCCAG GCACT AGTAC CGAGC CCTCT GAAGG CAGTG CGCCA GATTC TGGCG |
| 4601 | GTGGA GGTTC CGGTG GCGGG GGATC CGGTG GCGGG GGATC CGGTG GCGGG |
| 4651 | GGATC CGGTG GCGGG GGATC CCTGG TCCCC CGGGG CAGCG GAGGC GACAA |
| 4701 | AACTC ACACA TGCCC ACCGT GCCCA GCTCC AGAAC TCCTG GGCGG ACCGT |
| 4751 | CAGTC TTCCT CTTCC CCCCA AAACC CAAGG ACACC CTCAT GATCT CCCGG |
| 4801 | ACCCC TGAGG TCACA TGCGT GGTGG TGGAC GTGAG CCACG AAGAC CCTGA |
| 4851 | GGTCA AGTTC AACTG GTACG TGGAC GGCGT GGAGG TGCAT AATGC CAAGA |
| 4901 | CAAAG CCGCG GGAGG AGCAG TACAA CAGCA CGTAC CGTGT GGTCA GCGTC |
| 4951 | CTCAC CGTCC TGCAC CAGGA CTGGC TGAAT GGCAA GGAGT ACAAG TGCAA |
| 5001 | GGTCT CCAAC AAAGC CCTCC CAGCC CCCAT CGAGA AAACC ATCTC CAAAG |
| 5051 | CCAAA GGGCA GCCCC GAGAA CCACA GGTGT ACACC CTGCC CCCAT CCCGG |
| 5101 | GATGA GCTGA CCAAG AACCA GGTCA GCCTG ACCTG CCTGG TCAAA GGCTT |
| 5151 | CTATC CCAGC GACAT CGCCG TGGAG TGGGA GAGCA ATGGG CAGCC GGAGA |
| 5201 | ACAAC TACAA GACCA CGCCT CCCGT GTTGG ACTCC GACGG CTCCT TCTTC |
| 5251 | CTCTA CAGCA AGCTC ACCGT GGACA AGAGC AGGTG GCAGC AGGGG AACGT |
| 5301 | CTTCT CATGC TCCGT GATGC ATGAG GCTCT GCACA ACCAC TACAC GCAGA |
| 5351 | AGAGC CTCTC CCTGT CTCCG GGTAA ATGA |

### VWF034 Protein Sequence (SEQ ID NO: 87)

| | |
|---|---|
| 1 | MIPARFAGVL LALALILPGT LCAEGTRGRS STARCSLFGS DFVNTFDGSM |
| 51 | YSFAGYCSYL LAGGCQKRSF SIIGDFQNGK RVSLSVYLGE FFDIHLFVNG |
| 101 | TVTQGDQRVS MPYASKGLYL ETEAGYYKLS GEAYGFVARI DGSGNFQVLL |
| 151 | SDRYFNKTCG LCGNFNIFAE DDFMTQEGTL TSDPYDFANS WALSSGEQWC |
| 201 | ERASPPSSSC NISSGEMQKG LWEQCQLLKS TSVFARCHPL VDPEPFVALC |
| 251 | EKTLCECAGG LECACPALLE YARTCAQEGM VLYGWTDHSA CSPVCPAGME |
| 301 | YRQCVSPCAR TCQSLHINEM CQERCVDGCS CPEGQLLDEG LCVESTECPC |
| 351 | VHSGKRYPPG TSLSRDCNTC ICRNSQWICS NEECPGECLV TGQSHFKSFD |
| 401 | NRYFTFSGIC QYLLARDCQD HSFSIVIETV QCADDRDAVC TRSVTVRLPG |
| 451 | LHNSLVKLKH GAGVAMDGQD IQLPLLKGDL RIQHTVTASV RLSYGEDLQM |
| 501 | DWDGRGRLLV KLSPVYAGKT CGLCGNYNGN QGDDFLTPSG LAEPRVEDFG |
| 551 | NAWKLHGDCQ DLQKQHSDPC ALNPRMTRFS EEACAVLTSP TFEACHRAVS |
| 601 | PLPYLRNCRY DVCSCSDGRE CLCGALASYA AACAGRGVRV AWREPGRCEL |
| 651 | NCPKGQVYLQ CGTPCNLTCR SLSYPDEECN EACLEGCFCP PGLYMDERGD |
| 701 | CVPKAQCPCY YDGEIFQPED IFSDHHTMCY CEDGFMHCTM SGVPGSLLPD |
| 751 | AVLSSPLSHR SKRSLSCRPP MVKLVCPADN LRAEGLECTK TCQNYDLECM |
| 801 | SMGCVSGCLC PPGMVRHENR CVALERCPCF HQGKEYAPGE TVKIGCNTCV |
| 851 | CRDRKWNCTD HVCDATCSTI GMAHYLTFDG LKYLFPGECQ YVLVQDYCGS |
| 901 | NPGTFRILVG NKGCSHPSVK CKKRVTILVE GGEIELFDGE VNVKRPMKDE |
| 951 | THFEVVESGR YIILLLGKAL SVVWDRHLSI SVVLKQTYQE KVCGLCGNFD |
| 1001 | GIQNNDLTSS NLQVEEDPVD FGNSWKVSSQ CADTRKVPLD SSPATCHNNI |
| 1051 | MKQTMVDSSC RILTSDVFQD CNKLVDPEPY LDVCIYDTCS CESIGDCAAF |
| 1101 | CDTIAAYAHV CAQHGKVVTW RTATLCPQSC EERNLRENGY EAEWRYNSCA |
| 1151 | PACQVTCQHP EPLACPVQCV EGCHAHCPPG KILDELLQTC VDPEDCPVCE |
| 1201 | VAGRRFASGK KVTLNPSDPE HCQICHCDVV NLTCEACQEP ISGTSESATP |
| 1251 | ESGPGSEPAT SGSETPGTSE SATPESGPGS EPATSGSETP GTSESATPES |
| 1301 | GPGTSTEPSE GSAPGSPAGS PTSTEEGTSE SATPESGPGS EPATSGSETP |
| 1351 | GTSESATPES GPGSPAGSPT STEEGSPAGS PTSTEEGTST EPSEGSAPGT |
| 1401 | SESATPESGP GTSESATPES GPGTSESATP ESGPGSEPAT SGSETPGSEP |
| 1451 | ATSGSETPGS PAGSPTSTEE GTSTEPSEGS APGTSTEPSE GSAPGSEPAT |
| 1501 | SGSETPGTSE SATPESGPGT STEPSEGSAP DIGGGGGSGG GGSLVPRGSG |
| 1551 | GDKTHTCPPC PAPELLGGPS VFLFPPKPKD TLMISRTPEV TCVVVDVSHE |
| 1601 | DPEVKFNWYV DGVEVHNAKT KPREEQYNST YRVVSVLTVL HQDWLNGKEY |
| 1651 | KCKVSNKALP APIEKTISKA KGQPREPQVY TLPPSRDELT KNQVSLTCLV |
| 1701 | KGFYPSDIAV EWESNGQPEN NYKTTPPVLD SDGSFFLYSK LTVDKSRWQQ |
| 1751 | GNVFSCSVMH EALHNHYTQK SLSLSPGK* |

### VWF050 Nucleotide Sequence (IHH Triple Mutant) (SEQ ID NO: 149)

| | |
|---|---|
| 1 | ATGAT TCCTG CCAGA TTTGC CGGGG TGCTG CTTGC TCTGG CCCTC ATTTT |
| 51 | GCCAG GGACC CTTTG TGCAG AAGGA ACTCG CGGCA GGTCA TCCAC GGCCC |
| 101 | GATGC AGCCT TTTCG GAAGT GACTT CGTCA ACACC TTTGA TGGGA GCATG |
| 151 | TACAG CTTTG CGGGA TACTG CAGTT ACCTC CTGGC AGGGG GCTGC CAGAA |
| 201 | ACGCT CCTTC TCGAT TATTG GGGAC TTCCA GAATG GCAAG AGAGT GAGCC |
| 251 | TCTCC GTGTA TCTTG GGGAA TTTTT TGACA TCCAT TTGTT TGTCA ATGGT |
| 301 | ACCGT GACAC AGGGG GACCA AAGAG TCTCC ATGCC CTATG CCTCC AAAGG |
| 351 | GCTGT ATCTA GAAAC TGAGG CTGGG TACTA CAAGC TGTCC GGTGA GGCCT |
| 401 | ATGGC TTTGT GGCCA GGATC GATGG CAGCG GCAAC TTTCA AGTCC TGCTG |
| 451 | TCAGA CAGAT ACTTC AACAA GACCT GCGGG CTGTG TGGCA ACTTT AACAT |
| 501 | CTTTG CTGAA GATGA CTTTA TGACC CAAGA AGGGA CCTTG ACCTC GGACC |
| 551 | CTTAT GACTT TGCCA ACTCA TGGGC TCTGA GCAGT GGAGA ACAGT GGTGT |
| 601 | GAACG GGCAT CTCCT CCCAG CAGCT CATGC AACAT CTCCT CTGGG GAAAT |
| 651 | GCAGA AGGGC CTGTG GGAGC AGTGC CAGCT TCTGA AGAGC ACCTC GGTGT |
| 701 | TTGCC CGCTG CCACC CTCTG GTGGA CCCCG AGCCT TTTGT GGCCC TGTGT |
| 751 | GAGAA GACTT TGTGT GAGTG TGCTG GGGGG CTGGA GTGCG CCTGC CCTGC |
| 801 | CCTCC TGGAG TACGC CCGGA CCTGT GCCCA GGAGG GAATG GTGCT GTACG |
| 851 | GCTGG ACCGA CCACA GCGCG TGCAG CCCAG TGTGC CCTGC TGGTA TGGAG |
| 901 | TATAG GCAGT GTGTG TCCCC TTGCG CCAGG ACCTG CCAGA GCCTG CACAT |
| 951 | CAATG AAATG TGTCA GGAGC GATGC GTGGA TGGCT GCAGC TGCCC TGAGG |
| 1001 | GACAG CTCCT GGATG AAGGC CTCTG CGTGG AGAGC ACCGA GTGTC CCTGC |
| 1051 | GTGCA TTCCG GAAAG CGCTA CCCTC CCGGC ACCTC CCTCT CTCGA GACTG |
| 1101 | CAACA CCTGC ATTTG CCGAA ACAGC CAGTG GATCT GCAGC AATGA AGAAT |
| 1151 | GTCCA GGGGA GTGCC TTGTC ACTGG TCAAT CCCAC TTCAA GAGCT TTGAC |
| 1201 | AACAG ATACT TCACC TTCAG TGGGA TCTGC CAGTA CCTGC TGGCC CGGGA |
| 1251 | TTGCC AGGAC CACTC CTTCT CCATT GTCAT TGAGA CTGTC CAGTG TGCTG |
| 1301 | ATGAC CGCGA CGCTG TGTGC ACCCG CTCCG TCACC GTCCG GCTGC CTGGC |
| 1351 | CTGCA CAACA GCCTT GTGAA ACTGA AGCAT GGGGC AGGAG TTGCC ATGGA |
| 1401 | TGGCC AGGAC ATCCA GCTCC CCCTC CTGAA AGGTG ACCTC CGCAT CCAGC |
| 1451 | ATACA GTGAC GGCCT CCGTG CGCCT CAGCT ACGGG GAGGA CCTGC AGATG |
| 1501 | GACTG GGATG GCCGC GGGAG GCTGC TGGTG AAGCT GTCCC CCGTC TATGC |
| 1551 | CGGGA AGACC TGCGG CCTGT GTGGG AATTA CAATG GCAAC CAGGG CGACG |
| 1601 | ACTTC CTTAC CCCCT CTGGG CTGGC GGAGC CCCGG GTGGA GGACT TCGGG |
| 1651 | AACGC CTGGA AGCTG CACGG GGACT GCCAG GACCT GCAGA AGCAG CACAG |
| 1701 | CGATC CCTGC GCCCT CAACC CGCGC ATGAC CAGGT TCTCC GAGGA GGCGT |
| 1751 | GCGCG GTCCT GACGT CCCCC ACATT CGAGG CCTGC CATCG TGCCG TCAGC |
| 1801 | CCGCT GCCCT ACCTG CGGAA CTGCC GCTAC GACGT GTGCT CCTGC TCGGA |
| 1851 | CGGCC GCGAG TGCCT GTGCG GCGCC CTGGC CAGCT ATGCC GCGGC CTGCG |
| 1901 | CGGGG AGAGG CGTGC GCGTC GCGTG GCGCG AGCCA GGCCG CTGTG AGCTG |
| 1951 | AACTG CCCGA AAGGC CAGGT GTACC TGCAG TGCGG GACCC CCTGC AACCT |
| 2001 | GACCT GCCGC TCTCT CTCTT ACCCG GATGA GGAAT GCAAT GAGGC CTGCC |
| 2051 | TGGAG GGCTG CTTCT GCCCC CCAGG GCTCT ACATG GATGA GAGGG GGGAC |
| 2101 | TGCGT GCCCA AGGCC CAGTG CCCCT GTTAC TATGA CGGTG AGATC TTCCA |
| 2151 | GCCAG AAGAC ATCTT CTCAG ACCAT CACAC CATGT GCTAC TGTGA GGATG |
| 2201 | GCTTC ATGCA CTGTA CCATG AGTGG AGTCC CCGGA AGCTT GCTGC CTGAC |
| 2251 | GCTGT CCTCA GCAGT CCCCT GTCTC ATCGC AGCAA AAGGA GCCTA TCCTG |
| 2301 | TCGGC CCCCC ATGGT CAAGC TGGTG TGTCC CGCTG ACAAC CTGCG GGCTG |
| 2351 | AAGGG CTCGA GTGTA CCAAA ACGTG CCAGA ACTAT GACCT GGAGT GCATG |
| 2401 | AGCAT GGGCT GTGTC TCTGG CTGCC TCTGC CCCCC GGGCA TGGTC CGGCA |
| 2451 | TGAGA ACAGA TGTGT GGCCC TGGAA AGGTG TCCCT GCTTC CATCA GGGCA |
| 2501 | AGGAG TATGC CCCTG GAGAA ACAGT GAAGA TTGGC TGCAA CACTT GTGTC |
| 2551 | TGTCG GGACC GGAAG TGGAA CTGCA CAGAC CATGT GTGTG ATGCC ACGTG |
| 2601 | CTCCA CGATC GGCAT GGCCC ACTAC CTCAC CTTCG ACGGG CTCAA ATACC |
| 2651 | TGTTC CCCGG GGAGT GCCAG TACGT TCTGG TGCAG GATTA CTGCG GCAGT |
| 2701 | AACCC TGGGA CCTTT CGGAT CCTAG TGGGG AATAA GGGAT GCAGC CACCC |
| 2751 | CTCAG TGAAA TGCAA GAAAC GGGTC ACCAT CCTGG TGGAG GGAGG AGAGA |
| 2801 | TTGAG CTGTT TGACG GGGAG GTGAA TGTGA AGAGG CCCAT GAAGG ATGAG |
| 2851 | ACTCA CTTTG AGGTG GTGGA GTCTG GCCGG TACAT CATTC TGCTG CTGGG |
| 2901 | CAAAG CCCTC TCCGT GGTCT GGGAC CGCCA CCTGA GCATC TCCGT GGTCC |
| 2951 | TGAAG CAGAC ATACC AGGAG AAAGT GTGTG GCCTG TGTGG GAATT TTGAT |
| 3001 | GGCAT CCAGA ACAAT GACCT CACCA GCAGC AACCT CCAAG TGGAG GAAGA |
| 3051 | CCCTG TGGAC TTTGG GAACT CCTGG AAAGT GAGCT CGCAG TGTGC TGACA |
| 3101 | CCAGA AAAGT GCCTC TGGAC TCATC CCCTG CCACC TGCCA TAACA ACATC |
| 3151 | ATGAA GCAGA CGATG GTGGA TTCCT CCTGT AGAAT CCTTA CCAGT GACGT |
| 3201 | CTTCC AGGAC TGCAA CAAGC TGGTG GACCC CGAGC CATAT CTGGA TGTCT |
| 3251 | GCATT TACGA CACCT GCTCC TGTGA GTCCA TTGGG GACTG CGCCG CATTC |
| 3301 | TGCGA CACCA TTGCT GCCTA TGCCC ACGTG TGTGC CCAGC ATGGC AAGGT |
| 3351 | GGTGA CCTGG AGGAC GGCCA CATTG TGCCC CCAGA GCTGC GAGGA GAGGA |
| 3401 | ATCTC CGGGA GAACG GGTAT GAGGC TGAGT GGCGC TATAA CAGCT GTGCA |
| 3451 | CCTGC CTGTC AAGTC ACGTG TCAGC ACCCT GAGCC ACTGG CCTGC CCTGT |
| 3501 | GCAGT GTGTG GAGGG CTGCC ATGCC CACTG CCCTC CAGGG AAAAT CCTGG |
| 3551 | ATGAG CTTTT GCAGA CCTGC GTTGA CCCTG AAGAC TGTCC AGTGT GTGAG |
| 3601 | GTGGC TGGCC GGCGT TTTGC CTCAG GAAAG AAAGT CACCT TGAAT CCCAG |
| 3651 | TGACC CTGAG CACTG CCAGA TTTGC CACTG TGATG TTGTC AACCT CACCT |
| 3701 | GTGAA GCCTG CCAGG AGCCG ATATC TGGCG GTGGA GGTTC CGGTG GCGGG |
| 3751 | GGATC CGGCG GTGGA GGTTC CGGCG GTGGA GGTTC CGGTG GCGGG GGATC |
| 3801 | CGGTG GCGGG GGATC CCTGG TCCCC CGGGG CAGCG GCGGT GGAGG TTCCG |
| 3851 | GTGGC GGGGG ATCCG ACAAA ACTCA CACAT GCCCA CCGTG CCCAG CTCCA |
| 3901 | GAACT CCTGG GCGGA CCGTC AGTCT TCCTC TTCCC CCCAA AACCC AAGGA |
| 3951 | CACCC TCATG GCCTC CCGGA CCCCT GAGGT CACAT GCGTG GTGGT GGACG |
| 4001 | TGAGC CACGA AGACC CTGAG GTCAA GTTCA ACTGG TACGT GGACG GCGTG |
| 4051 | GAGGT GCATA ATGCC AAGAC AAAGC CGCGG GAGGA GCAGT ACAAC AGCAC |
| 4101 | GTACC GTGTG GTCAG CGTCC TCACC GTCCT GGCCC AGGAC TGGCT GAATG |
| 4151 | GCAAG GAGTA CAAGT GCAAG GTCTC CAACA AAGCC CTCCC AGCCC CCATC |
| 4201 | GAGAA AACCA TCTCC AAAGC CAAAG GGCAG CCCCG AGAAC CACAG GTGTA |
| 4251 | CACCC TGCCC CCATC CCGCG ATGAG CTGAC CAAGA ACCAG GTCAG CCTGA |
| 4301 | CCTGC CTGGT CAAAG GCTTC TATCC CAGCG ACATC GCCGT GGAGT GGGAG |
| 4351 | AGCAA TGGGC AGCCG GAGAA CAACT ACAAG ACCAC GCCTC CCGTG TTGGA |
| 4401 | CTCCG ACGGC TCCTT CTTCC TCTAC AGCAA GCTCA CCGTG GACAA GAGCA |
| 4451 | GGTGG CAGCA GGGGA ACGTC TTCTC ATGCT CCGTG ATGCA TGAGG CTCTG |
| 4501 | CACAA CGCCT ACACG CAGAA GAGCC TCTCC CTGTC TCCGG GTAAA TGA |

### VWF050 Protein Sequence (IHH Triple Mutant) (SEQ ID NO: 150)

| | |
|---|---|
| 1 | MIPARFAGVL LALALILPGT LCAEGTRGRS STARCSLFGS DFVNTFDGSM |
| 51 | YSFAGYCSYL LAGGCQKRSF SIIGDFQNGK RVSLSVYLGE FFDIHLFVNG |
| 101 | TVTQGDQRVS MPYASKGLYL ETEAGYYKLS GEAYGFVARI DGSGNFQVLL |
| 151 | SDRYFNKTCG LCGNFNIFAE DDFMTQEGTL TSDPYDFANS WALSSGEQWC |
| 201 | ERASPPSSSC NISSGEMQKG LWEQCQLLKS TSVFARCHPL VDPEPFVALC |
| 251 | EKTLCECAGG LECACPALLE YARTCAQEGM VLYGWTDHSA CSPVCPAGME |
| 301 | YRQCVSPCAR TCQSLHINEM CQERCVDGCS CPEGQLLDEG LCVESTECPC |
| 351 | VHSGKRYPPG TSLSRDCNTC ICRNSQWICS NEECPGECLV TGQSHFKSFD |
| 401 | NRYFTFSGIC QYLLARDCQD HSFSIVIETV QCADDRDAVC TRSVTVRLPG |
| 451 | LHNSLVKLKH GAGVAMDGQD IQLPLLKGDL RIQHTVTASV RLSYGEDLQM |
| 501 | DWDGRGRLLV KLSPVYAGKT CGLCGNYNGN QGDDFLTPSG LAEPRVEDFG |
| 551 | NAWKLHGDCQ DLQKQHSDPC ALNPRMTRFS EEACAVLTSP TFEACHRAVS |
| 601 | PLPYLRNCRY DVCSCSDGRE CLCGALASYA AACAGRGVRV AWREPGRCEL |
| 651 | NCPKGQVYLQ CGTPCNLTCR SLSYPDEECN EACLEGCFCP PGLYMDERGD |
| 701 | CVPKAQCPCY YDGEIFQPED IFSDHHTMCY CEDGFMHCTM SGVPGSLLPD |
| 751 | AVLSSPLSHR SKRSLSCRPP MVKLVCPADN LRAEGLECTK TCQNYDLECM |
| 801 | SMGCVSGCLC PPGMVRHENR CVALERCPCF HQGKEYAPGE TVKIGCNTCV |
| 851 | CRDRKWNCTD HVCDATCSTI GMAHYLTFDG LKYLFPGECQ YVLVQDYCGS |
| 901 | NPGTFRILVG NKGCSHPSVK CKKRVTILVE GGEIELFDGE VNVKRPMKDE |
| 951 | THFEVVESGR YIILLLGKAL SVVWDRHLSI SVVLKQTYQE KVCGLCGNFD |
| 1001 | GIQNNDLTSS NLQVEEDPVD FGNSWKVSSQ CADTRKVPLD SSPATCHNNI |
| 1051 | MKQTMVDSSC RILTSDVFQD CNKLVDPEPY LDVCIYDTCS CESIGDCAAF |
| 1101 | CDTIAAYAHV CAQHGKVVTW RTATLCPQSC EERNLRENGY EAEWRYNSCA |
| 1151 | PACQVTCQHP EPLACPVQCV EGCHAHCPPG KILDELLQTC VDPEDCPVCE |
| 1201 | VAGRRFASGK KVTLNPSDPE HCQICHCDVV NLTCEACQEP ISGGGGSGGG |
| 1251 | GSGGGGSGGG GSGGGGSGGG GSLVPRGSGG GGSGGGGSDK THTCPPCPAP |
| 1301 | ELLGGPSVFL FPPKPKDTLM ASRTPEVTCV VVDVSHEDPE VKFNWYVDGV |
| 1351 | EVHNAKTKPR EEQYNSTYRV VSVLTVLAQD WLNGKEYKCK VSNKALPAPI |
| 1401 | EKTISKAKGQ PREPQVYTLP PSRDELTKNQ VSLTCLVKGF YPSDIAVEWE |
| 1451 | SNGQPENNYK TTPPVLDSDG SFFLYSKLTV DKSRWQQGNV FSCSVMHEAL |
| 1501 | HNAYTQKSLS LSPGK* |

### VWF057 Nucleotide Sequence (SEQ ID NO: 151)

| | |
|---|---|
| 1 | ATGAT TCCTG CCAGA TTTGC CGGGG TGCTG CTTGC TCTGG CCCTC ATTTT |
| 51 | GCCAG GGACC CTTTG TGCAG AAGGA ACTCG CGGCA GGTCA TCCAC GGCCC |
| 101 | GATGC AGCCT TTTCG GAAGT GACTT CGTCA ACACC TTTGA TGGGA GCATG |
| 151 | TACAG CTTTG CGGGA TACTG CAGTT ACCTC CTGGC AGGGG GCTGC CAGAA |
| 201 | ACGCT CCTTC TCGAT TATTG GGGAC TTCCA GAATG GCAAG AGAGT GAGCC |
| 251 | TCTCC GTGTA TCTTG GGGAA TTTTT TGACA TCCAT TTGTT TGTCA ATGGT |
| 301 | ACCGT GACAC AGGGG GACCA AAGAG TCTCC ATGCC CTATG CCTCC AAAGG |
| 351 | GCTGT ATCTA GAAAC TGAGG CTGGG TACTA CAAGC TGTCC GGTGA GGCCT |
| 401 | ATGGC TTTGT GGCCA GGATC GATGG CAGCG GCAAC TTTCA AGTCC TGCTG |
| 451 | TCAGA CAGAT ACTTC AACAA GACCT GCGGG CTGTG TGGCA ACTTT AACAT |
| 501 | CTTTG CTGAA GATGA CTTTA TGACC CAAGA AGGGA CCTTG ACCTC GGACC |
| 551 | CTTAT GACTT TGCCA ACTCA TGGGC TCTGA GCAGT GGAGA ACAGT GGTGT |
| 601 | GAACG GGCAT CTCCT CCCAG CAGCT CATGC AACAT CTCCT CTGGG GAAAT |
| 651 | GCAGA AGGGC CTGTG GGAGC AGTGC CAGCT TCTGA AGAGC ACCTC GGTGT |
| 701 | TTGCC CGCTG CCACC CTCTG GTGGA CCCCG AGCCT TTTGT GGCCC TGTGT |
| 751 | GAGAA GACTT TGTGT GAGTG TGCTG GGGGG CTGGA GTGCG CCTGC CCTGC |
| 801 | CCTCC TGGAG TACGC CCGGA CCTGT GCCCA GGAGG GAATG GTGCT GTACG |
| 851 | GCTGG ACCGA CCACA GCGCG TGCAG CCCAG TGTGC CCTGC TGGTA TGGAG |
| 901 | TATAG GCAGT GTGTG TCCCC TTGCG CCAGG ACCTG CCAGA GCCTG CACAT |
| 951 | CAATG AAATG TGTCA GGAGC GATGC GTGGA TGGCT GCAGC TGCCC TGAGG |
| 1001 | GACAG CTCCT GGATG AAGGC CTCTG CGTGG AGAGC ACCGA GTGTC CCTGC |
| 1051 | GTGCA TTCCG GAAAG CGCTA CCCTC CCGGC ACCTC CCTCT CTCGA GACTG |
| 1101 | CAACA CCTGC ATTTG CCGAA ACAGC CAGTG GATCT GCAGC AATGA AGAAT |
| 1151 | GTCCA GGGGA GTGCC TTGTC ACTGG TCAAT CCCAC TTCAA GAGCT TTGAC |
| 1201 | AACAG ATACT TCACC TTCAG TGGGA TCTGC CAGTA CCTGC TGGCC CGGGA |
| 1251 | TTGCC AGGAC CACTC CTTCT CCATT GTCAT TGAGA CTGTC CAGTG TGCTG |
| 1301 | ATGAC CGCGA CGCTG TGTGC ACCCG CTCCG TCACC GTCCG GCTGC CTGGC |
| 1351 | CTGCA CAACA GCCTT GTGAA ACTGA AGCAT GGGGC AGGAG TTGCC ATGGA |
| 1401 | TGGCC AGGAC ATCCA GCTCC CCCTC CTGAA AGGTG ACCTC CGCAT CCAGC |
| 1451 | ATACA GTGAC GGCCT CCGTG CGCCT CAGCT ACGGG GAGGA CCTGC AGATG |
| 1501 | GACTG GGATG GCCGC GGGAG GCTGC TGGTG AAGCT GTCCC CCGTC TATGC |
| 1551 | CGGGA AGACC TGCGG CCTGT GTGGG AATTA CAATG GCAAC CAGGG CGACG |
| 1601 | ACTTC CTTAC CCCCT CTGGG CTGGC GGAGC CCCGG GTGGA GGACT TCGGG |
| 1651 | AACGC CTGGA AGCTG CACGG GGACT GCCAG GACCT GCAGA AGCAG CACAG |
| 1701 | CGATC CCTGC GCCCT CAACC CGCGC ATGAC CAGGT TCTCC GAGGA GGCGT |
| 1751 | GCGCG GTCCT GACGT CCCCC ACATT CGAGG CCTGC CATCG TGCCG TCAGC |
| 1801 | CCGCT GCCCT ACCTG CGGAA CTGCC GCTAC GACGT GTGCT CCTGC TCGGA |
| 1851 | CGGCC GCGAG TGCCT GTGCG GCGCC CTGGC CAGCT ATGCC GCGGC CTGCG |
| 1901 | CGGGG AGAGG CGTGC GCGTC GCGTG GCGCG AGCCA GGCCG CTGTG AGCTG |
| 1951 | AACTG CCCGA AAGGC CAGGT GTACC TGCAG TGCGG GACCC CCTGC AACCT |
| 2001 | GACCT GCCGC TCTCT CTCTT ACCCG GATGA GGAAT GCAAT GAGGC CTGCC |
| 2051 | TGGAG GGCTG CTTCT GCCCC CCAGG GCTCT ACATG GATGA GAGGG GGGAC |
| 2101 | TGCGT GCCCA AGGCC CAGTG CCCCT GTTAC TATGA CGGTG AGATC TTCCA |
| 2151 | GCCAG AAGAC ATCTT CTCAG ACCAT CACAC CATGT GCTAC TGTGA GGATG |
| 2201 | GCTTC ATGCA CTGTA CCATG AGTGG AGTCC CCGGA AGCTT GCTGC CTGAC |
| 2251 | GCTGT CCTCA GCAGT CCCCT GTCTC ATCGC AGCAA AAGGA GCCTA TCCTG |
| 2301 | TCGGC CCCCC ATGGT CAAGC TGGTG TGTCC CGCTG ACAAC CTGCG GGCTG |
| 2351 | AAGGG CTCGA GTGTA CCAAA ACGTG CCAGA ACTAT GACCT GGAGT GCATG |
| 2401 | AGCAT GGGCT GTGTC TCTGG CTGCC TCTGC CCCCC GGGCA TGGTC CGGCA |
| 2451 | TGAGA ACAGA TGTGT GGCCC TGGAA AGGTG TCCCT GCTTC CATCA GGGCA |
| 2501 | AGGAG TATGC CCCTG GAGAA ACAGT GAAGA TTGGC TGCAA CACTT GTGTC |
| 2551 | TGTCG GGACC GGAAG TGGAA CTGCA CAGAC CATGT GTGTG ATGCC ACGTG |
| 2601 | CTCCA CGATC GGCAT GGCCC ACTAC CTCAC CTTCG ACGGG CTCAA ATACC |
| 2651 | TGTTC CCCGG GGAGT GCCAG TACGT TCTGG TGCAG GATTA CTGCG GCAGT |
| 2701 | AACCC TGGGA CCTTT CGGAT CCTAG TGGGG AATAA GGGAT GCAGC CACCC |
| 2751 | CTCAG TGAAA TGCAA GAAAC GGGTC ACCAT CCTGG TGGAG GGAGG AGAGA |
| 2801 | TTGAG CTGTT TGACG GGGAG GTGAA TGTGA AGAGG CCCAT GAAGG ATGAG |
| 2851 | ACTCA CTTTG AGGTG GTGGA GTCTG GCCGG TACAT CATTC TGCTG CTGGG |
| 2901 | CAAAG CCCTC TCCGT GGTCT GGGAC CGCCA CCTGA GCATC TCCGT GGTCC |
| 2951 | TGAAG CAGAC ATACC AGGAG AAAGT GTGTG GCCTG TGTGG GAATT TTGAT |
| 3001 | GGCAT CCAGA ACAAT GACCT CACCA GCAGC AACCT CCAAG TGGAG GAAGA |
| 3051 | CCCTG TGGAC TTTGG GAACT CCTGG AAAGT GAGCT CGCAG TGTGC TGACA |
| 3101 | CCAGA AAAGT GCCTC TGGAC TCATC CCCTG CCACC TGCCA TAACA ACATC |
| 3151 | ATGAA GCAGA CGATG GTGGA TTCCT CCTGT AGAAT CCTTA CCAGT GACGT |
| 3201 | CTTCC AGGAC TGCAA CAAGC TGGTG GACCC CGAGC CATAT CTGGA TGTCT |
| 3251 | GCATT TACGA CACCT GCTCC TGTGA GTCCA TTGGG GACTG CGCCG CATTC |
| 3301 | TGCGA CACCA TTGCT GCCTA TGCCC ACGTG TGTGC CCAGC ATGGC AAGGT |
| 3351 | GGTGA CCTGG AGGAC GGCCA CATTG TGCCC CCAGA GCTGC GAGGA GAGGA |
| 3401 | ATCTC CGGGA GAACG GGTAT GAGGC TGAGT GGCGC TATAA CAGCT GTGCA |
| 3451 | CCTGC CTGTC AAGTC ACGTG TCAGC ACCCT GAGCC ACTGG CCTGC CCTGT |
| 3501 | GCAGT GTGTG GAGGG CTGCC ATGCC CACTG CCCTC CAGGG AAAAT CCTGG |
| 3551 | ATGAG CTTTT GCAGA CCTGC GTTGA CCCTG AAGAC TGTCC AGTGT GTGAG |
| 3601 | GTGGC TGGCC GGCGT TTTGC CTCAG GAAAG AAAGT CACCT TGAAT CCCAG |
| 3651 | TGACC CTGAG CACTG CCAGA TTTGC CACTG TGATG TTGTC AACCT CACCT |
| 3701 | GTGAA GCCTG CCAGG AGCCG ATATC GGGCG CGCCA ACATC AGAGA GCGCC |
| 3751 | ACCCC TGAAA GTGGT CCCGG GAGCG AGCCA GCCAC ATCTG GGTCG GAAAC |
| 3801 | GCCAG GCACA AGTGA GTCTG CAACT CCCGA GTCCG GACCT GGCTC CGAGC |
| 3851 | CTGCC ACTAG CGGCT CCGAG ACTCC GGGAA CTTCC GAGAG CGCTA CACCA |
| 3901 | GAAAG CGGAC CCGGA ACCAG TACCG AACCT AGCGA GGGCT CTGCT CCGGG |
| 3951 | CAGCC CAGCC GGCTC TCCTA CATCC ACGGA GGAGG GCACT TCCGA ATCCG |
| 4001 | CCACC CCGGA GTCAG GGCCA GGATC TGAAC CCGCT ACCTC AGGCA GTGAG |
| 4051 | ACGCC AGGAA CGAGC GAGTC CGCTA CACCG GAGAG TGGGC CAGGG AGCCC |
| 4101 | TGCTG GATCT CCTAC GTCCA CTGAG GAAGG GTCAC CAGCG GGCTC GCCCA |
| 4151 | CCAGC ACTGA AGAAG GTGCC TCGAG CGGCG GTGGA GGTTC CGGTG GCGGG |
| 4201 | GGATC CGGTG GCGGG GGATC CGGTG GCGGG GGATC CGGTG GCGGG GGATC |
| 4251 | CCTGG TCCCC CGGGG CAGCG GAGGC GACAA AACTC ACACA TGCCC ACCGT |
| 4301 | GCCCA GCTCC AGAAC TCCTG GGCGG ACCGT CAGTC TTCCT CTTCC CCCCA |
| 4351 | AAACC CAAGG ACACC CTCAT GATCT CCCGG ACCCC TGAGG TCACA TGCGT |
| 4401 | GGTGG TGGAC GTGAG CCACG AAGAC CCTGA GGTCA AGTTC AACTG GTACG |
| 4451 | TGGAC GGCGT GGAGG TGCAT AATGC CAAGA CAAAG CCGCG GGAGG AGCAG |
| 4501 | TACAA CAGCA CGTAC CGTGT GGTCA GCGTC CTCAC CGTCC TGCAC CAGGA |
| 4551 | CTGGC TGAAT GGCAA GGAGT ACAAG TGCAA GGTCT CCAAC AAAGC CCTCC |
| 4601 | CAGCC CCCAT CGAGA AAACC ATCTC CAAAG CCAAA GGGCA GCCCC GAGAA |
| 4651 | CCACA GGTGT ACACC CTGCC CCCAT CCCGG GATGA GCTGA CCAAG AACCA |
| 4701 | GGTCA GCCTG ACCTG CCTGG TCAAA GGCTT CTATC CCAGC GACAT CGCCG |
| 4751 | TGGAG TGGGA GAGCA ATGGG CAGCC GGAGA ACAAC TACAA GACCA CGCCT |
| 4801 | CCCGT GTTGG ACTCC GACGG CTCCT TCTTC CTCTA CAGCA AGCTC ACCGT |
| 4851 | GGACA AGAGC AGGTG GCAGC AGGGG AACGT CTTCT CATGC TCCGT GATGC |
| 4901 | ATGAG GCTCT GCACA ACCAC TACAC GCAGA AGAGC CTCTC CCTGT CTCCG |
| 4951 | GGTAA ATGA |

### VWF057 Protein Sequence (SEQ ID NO: 152)

| | |
|---|---|
| 1 | MIPARFAGVL LALALILPGT LCAEGTRGRS STARCSLFGS DFVNTFDGSM |
| 51 | YSFAGYCSYL LAGGCQKRSF SIIGDFQNGK RVSLSVYLGE FFDIHLFVNG |
| 101 | TVTQGDQRVS MPYASKGLYL ETEAGYYKLS GEAYGFVARI DGSGNFQVLL |
| 151 | SDRYFNKTCG LCGNFNIFAE DDFMTQEGTL TSDPYDFANS WALSSGEQWC |
| 201 | ERASPPSSSC NISSGEMQKG LWEQCQLLKS TSVFARCHPL VDPEPFVALC |
| 251 | EKTLCECAGG LECACPALLE YARTCAQEGM VLYGWTDHSA CSPVCPAGME |
| 301 | YRQCVSPCAR TCQSLHINEM CQERCVDGCS CPEGQLLDEG LCVESTECPC |
| 351 | VHSGKRYPPG TSLSRDCNTC ICRNSQWICS NEECPGECLV TGQSHFKSFD |
| 401 | NRYFTFSGIC QYLLARDCQD HSFSIVIETV QCADDRDAVC TRSVTVRLPG |
| 451 | LHNSLVKLKH GAGVAMDGQD IQLPLLKGDL RIQHTVTASV RLSYGEDLQM |
| 501 | DWDGRGRLLV KLSPVYAGKT CGLCGNYNGN QGDDFLTPSG LAEPRVEDFG |
| 551 | NAWKLHGDCQ DLQKQHSDPC ALNPRMTRFS EEACAVLTSP TFEACHRAVS |
| 601 | PLPYLRNCRY DVCSCSDGRE CLCGALASYA AACAGRGVRV AWREPGRCEL |
| 651 | NCPKGQVYLQ CGTPCNLTCR SLSYPDEECN EACLEGCFCP PGLYMDERGD |
| 701 | CVPKAQCPCY YDGEIFQPED IFSDHHTMCY CEDGFMHCTM SGVPGSLLPD |
| 751 | AVLSSPLSHR SKRSLSCRPP MVKLVCPADN LRAEGLECTK TCQNYDLECM |
| 801 | SMGCVSGCLC PPGMVRHENR CVALERCPCF HQGKEYAPGE TVKIGCNTCV |
| 851 | CRDRKWNCTD HVCDATCSTI GMAHYLTFDG LKYLFPGECQ YVLVQDYCGS |
| 901 | NPGTFRILVG NKGCSHPSVK CKKRVTILVE GGEIELFDGE VNVKRPMKDE |
| 951 | THFEVVESGR YIILLLGKAL SVVWDRHLSI SVVLKQTYQE KVCGLCGNFD |
| 1001 | GIQNNDLTSS NLQVEEDPVD FGNSWKVSSQ CADTRKVPLD SSPATCHNNI |
| 1051 | MKQTMVDSSC RILTSDVFQD CNKLVDPEPY LDVCIYDTCS CESIGDCAAF |
| 1101 | CDTIAAYAHV CAQHGKVVTW RTATLCPQSC EERNLRENGY EAEWRYNSCA |
| 1151 | PACQVTCQHP EPLACPVQCV EGCHAHCPPG KILDELLQTC VDPEDCPVCE |
| 1201 | VAGRRFASGK KVTLNPSDPE HCQICHCDVV NLTCEACQEP ISGAPTSESA |
| 1251 | TPESGPGSEP ATSGSETPGT SESATPESGP GSEPATSGSE TPGTSESATP |
| 1301 | ESGPGTSTEP SEGSAPGSPA GSPTSTEEGT SESATPESGP GSEPATSGSE |
| 1351 | TPGTSESATP ESGPGSPAGS PTSTEEGSPA GSPTSTEEGA SSGGGGSGGG |
| 1401 | GSGGGGSGGG GSGGGGSLVP RGSGGDKTHT CPPCPAPELL GGPSVFLFPP |
| 1451 | KPKDTLMISR TPEVTCVVVD VSHEDPEVKF NWYVDGVEVH NAKTKPREEQ |
| 1501 | YNSTYRVVSV LTVLHQDWLN GKEYKCKVSN KALPAPIEKT ISKAKGQPRE |
| 1551 | PQVYTLPPSR DELTKNQVSL TCLVKGFYPS DIAVEWESNG QPENNYKTTP |
| 1601 | PVLDSDGSFF LYSKLTVDKS RWQQGNVFSC SVMHEALHNH YTQKSLSLSP |
| 1651 | GK* |

VWF058 Nucleotide Sequence (VWF034 with IHH Mutation) (SEQ ID NO: 153)

| | |
|---|---|
| 1 | ATGAT TCCTG CCAGA TTTGC CGGGG TGCTG CTTGC TCTGG CCCTC ATTTT |
| 51 | GCCAG GGACC CTTTG TGCAG AAGGA ACTCG CGGCA GGTCA TCCAC GGCCC |
| 101 | GATGC AGCCT TTTCG GAAGT GACTT CGTCA ACACC TTTGA TGGGA GCATG |
| 151 | TACAG CTTTG CGGGA TACTG CAGTT ACCTC CTGGC AGGGG GCTGC CAGAA |
| 201 | ACGCT CCTTC TCGAT TATTG GGGAC TTCCA GAATG GCAAG AGAGT GAGCC |
| 251 | TCTCC GTGTA TCTTG GGGAA TTTTT TGACA TCCAT TTGTT TGTCA ATGGT |
| 301 | ACCGT GACAC AGGGG GACCA AAGAG TCTCC ATGCC CTATG CCTCC AAAGG |
| 351 | GCTGT ATCTA GAAAC TGAGG CTGGG TACTA CAAGC TGTCC GGTGA GGCCT |
| 401 | ATGGC TTTGT GGCCA GGATC GATGG CAGCG GCAAC TTTCA AGTCC TGCTG |
| 451 | TCAGA CAGAT ACTTC AACAA GACCT GCGGG CTGTG TGGCA ACTTT AACAT |
| 501 | CTTTG CTGAA GATGA CTTTA TGACC CAAGA AGGGA CCTTG ACCTC GGACC |
| 551 | CTTAT GACTT TGCCA ACTCA TGGGC TCTGA GCAGT GGAGA ACAGT GGTGT |
| 601 | GAACG GGCAT CTCCT CCCAG CAGCT CATGC AACAT CTCCT CTGGG GAAAT |
| 651 | GCAGA AGGGC CTGTG GGAGC AGTGC CAGCT TCTGA AGAGC ACCTC GGTGT |
| 701 | TTGCC CGCTG CCACC CTCTG GTGGA CCCCG AGCCT TTTGT GGCCC TGTGT |
| 751 | GAGAA GACTT TGTGT GAGTG TGCTG GGGGG CTGGA GTGCG CCTGC CCTGC |
| 801 | CCTCC TGGAG TACGC CCGGA CCTGT GCCCA GGAGG GAATG GTGCT GTACG |
| 851 | GCTGG ACCGA CCACA GCGCG TGCAG CCCAG TGTGC CCTGC TGGTA TGGAG |
| 901 | TATAG GCAGT GTGTG TCCCC TTGCG CCAGG ACCTG CCAGA GCCTG CACAT |
| 951 | CAATG AAATG TGTCA GGAGC GATGC GTGGA TGGCT GCAGC TGCCC TGAGG |
| 1001 | GACAG CTCCT GGATG AAGGC CTCTG CGTGG AGAGC ACCGA GTGTC CCTGC |
| 1051 | GTGCA TTCCG GAAAG CGCTA CCCTC CCGGC ACCTC CCTCT CTCGA GACTG |
| 1101 | CAACA CCTGC ATTTG CCGAA ACAGC CAGTG GATCT GCAGC AATGA AGAAT |
| 1151 | GTCCA GGGGA GTGCC TTGTC ACTGG TCAAT CCCAC TTCAA GAGCT TTGAC |
| 1201 | AACAG ATACT TCACC TTCAG TGGGA TCTGC CAGTA CCTGC TGGCC CGGGA |
| 1251 | TTGCC AGGAC CACTC CTTCT CCATT GTCAT TGAGA CTGTC CAGTG TGCTG |
| 1301 | ATGAC CGCGA CGCTG TGTGC ACCCG CTCCG TCACC GTCCG GCTGC CTGGC |
| 1351 | CTGCA CAACA GCCTT GTGAA ACTGA AGCAT GGGGC AGGAG TTGCC ATGGA |
| 1401 | TGGCC AGGAC ATCCA GCTCC CCCTC CTGAA AGGTG ACCTC CGCAT CCAGC |
| 1451 | ATACA GTGAC GGCCT CCGTG CGCCT CAGCT ACGGG GAGGA CCTGC AGATG |
| 1501 | GACTG GGATG GCCGC GGGAG GCTGC TGGTG AAGCT GTCCC CCGTC TATGC |
| 1551 | CGGGA AGACC TGCGG CCTGT GTGGG AATTA CAATG GCAAC CAGGG CGACG |
| 1601 | ACTTC CTTAC CCCCT CTGGG CTGGC GGAGC CCCGG GTGGA GGACT TCGGG |
| 1651 | AACGC CTGGA AGCTG CACGG GGACT GCCAG GACCT GCAGA AGCAG CACAG |
| 1701 | CGATC CCTGC GCCCT CAACC CGCGC ATGAC CAGGT TCTCC GAGGA GGCGT |
| 1751 | GCGCG GTCCT GACGT CCCCC ACATT CGAGG CCTGC CATCG TGCCG TCAGC |
| 1801 | CCGCT GCCCT ACCTG CGGAA CTGCC GCTAC GACGT GTGCT CCTGC TCGGA |
| 1851 | CGGCC GCGAG TGCCT GTGCG GCGCC CTGGC CAGCT ATGCC GCGGC CTGCG |
| 1901 | CGGGG AGAGG CGTGC GCGTC GCGTG GCGCG AGCCA GGCCG CTGTG AGCTG |
| 1951 | AACTG CCCGA AAGGC CAGGT GTACC TGCAG TGCGG GACCC CCTGC AACCT |
| 2001 | GACCT GCCGC TCTCT CTCTT ACCCG GATGA GGAAT GCAAT GAGGC CTGCC |
| 2051 | TGGAG GGCTG CTTCT GCCCC CCAGG GCTCT ACATG GATGA GAGGG GGGAC |
| 2101 | TGCGT GCCCA AGGCC CAGTG CCCCT GTTAC TATGA CGGTG AGATC TTCCA |
| 2151 | GCCAG AAGAC ATCTT CTCAG ACCAT CACAC CATGT GCTAC TGTGA GGATG |
| 2201 | GCTTC ATGCA CTGTA CCATG AGTGG AGTCC CCGGA AGCTT GCTGC CTGAC |
| 2251 | GCTGT CCTCA GCAGT CCCCT GTCTC ATCGC AGCAA AAGGA GCCTA TCCTG |
| 2301 | TCGGC CCCCC ATGGT CAAGC TGGTG TGTCC CGCTG ACAAC CTGCG GGCTG |
| 2351 | AAGGG CTCGA GTGTA CCAAA ACGTG CCAGA ACTAT GACCT GGAGT GCATG |
| 2401 | AGCAT GGGCT GTGTC TCTGG CTGCC TCTGC CCCCC GGGCA TGGTC CGGCA |
| 2451 | TGAGA ACAGA TGTGT GGCCC TGGAA AGGTG TCCCT GCTTC CATCA GGGCA |
| 2501 | AGGAG TATGC CCCTG GAGAA ACAGT GAAGA TTGGC TGCAA CACTT GTGTC |
| 2551 | TGTCG GGACC GGAAG TGGAA CTGCA CAGAC CATGT GTGTG ATGCC ACGTG |
| 2601 | CTCCA CGATC GGCAT GGCCC ACTAC CTCAC CTTCG ACGGG CTCAA ATACC |
| 2651 | TGTTC CCCGG GGAGT GCCAG TACGT TCTGG TGCAG GATTA CTGCG GCAGT |
| 2701 | AACCC TGGGA CCTTT CGGAT CCTAG TGGGG AATAA GGGAT GCAGC CACCC |
| 2751 | CTCAG TGAAA TGCAA GAAAC GGGTC ACCAT CCTGG TGGAG GGAGG AGAGA |
| 2801 | TTGAG CTGTT TGACG GGGAG GTGAA TGTGA AGAGG CCCAT GAAGG ATGAG |
| 2851 | ACTCA CTTTG AGGTG GTGGA GTCTG GCCGG TACAT CATTC TGCTG CTGGG |
| 2901 | CAAAG CCCTC TCCGT GGTCT GGGAC CGCCA CCTGA GCATC TCCGT GGTCC |
| 2951 | TGAAG CAGAC ATACC AGGAG AAAGT GTGTG GCCTG TGTGG GAATT TTGAT |
| 3001 | GGCAT CCAGA ACAAT GACCT CACCA GCAGC AACCT CCAAG TGGAG GAAGA |
| 3051 | CCCTG TGGAC TTTGG GAACT CCTGG AAAGT GAGCT CGCAG TGTGC TGACA |
| 3101 | CCAGA AAAGT GCCTC TGGAC TCATC CCCTG CCACC TGCCA TAACA ACATC |
| 3151 | ATGAA GCAGA CGATG GTGGA TTCCT CCTGT AGAAT CCTTA CCAGT GACGT |
| 3201 | CTTCC AGGAC TGCAA CAAGC TGGTG GACCC CGAGC CATAT CTGGA TGTCT |
| 3251 | GCATT TACGA CACCT GCTCC TGTGA GTCCA TTGGG GACTG CGCCG CATTC |
| 3301 | TGCGA CACCA TTGCT GCCTA TGCCC ACGTG TGTGC CCAGC ATGGC AAGGT |
| 3351 | GGTGA CCTGG AGGAC GGCCA CATTG TGCCC CCAGA GCTGC GAGGA GAGGA |
| 3401 | ATCTC CGGGA GAACG GGTAT GAGGC TGAGT GGCGC TATAA CAGCT GTGCA |
| 3451 | CCTGC CTGTC AAGTC ACGTG TCAGC ACCCT GAGCC ACTGG CCTGC CCTGT |
| 3501 | GCAGT GTGTG GAGGG CTGCC ATGCC CACTG CCCTC CAGGG AAAAT CCTGG |
| 3551 | ATGAG CTTTT GCAGA CCTGC GTTGA CCCTG AAGAC TGTCC AGTGT GTGAG |
| 3601 | GTGGC TGGCC GGCGT TTTGC CTCAG GAAAG AAAGT CACCT TGAAT CCCAG |
| 3651 | TGACC CTGAG CACTG CCAGA TTTGC CACTG TGATG TTGTC AACCT CACCT |
| 3701 | GTGAA GCCTG CCAGG AGCCG ATATC GGGTA CCTCA GAGTC TGCTA CCCCC |
| 3751 | GAGTC AGGGC CAGGA TCAGA GCCAG CCACC TCCGG GTCTG AGACA CCCGG |
| 3801 | GACTT CCGAG AGTGC CACCC CTGAG TCCGG ACCCG GGTCC GAGCC CGCCA |
| 3851 | CTTCC GGCTC CGAAA CTCCC GGCAC AAGCG AGAGC GCTAC CCCAG AGTCA |
| 3901 | GGACC AGGAA CATCT ACAGA GCCCT CTGAA GGCTC CGCTC CAGGG TCCCC |
| 3951 | AGCCG GCAGT CCCAC TAGCA CCGAG GAGGG AACCT CTGAA AGCGC CACAC |
| 4001 | CCGAA TCAGG GCCAG GGTCT GAGCC TGCTA CCAGC GGCAG CGAGA CACCA |
| 4051 | GGCAC CTCTG AGTCC GCCAC ACCAG AGTCC GGACC CGGAT CTCCC GCTGG |
| 4101 | GAGCC CCACC TCCAC TGAGG AGGGA TCTCC TGCTG GCTCT CCAAC ATCTA |
| 4151 | CTGAG GAAGG TACCT CAACC GAGCC ATCCG AGGGA TCAGC TCCCG GCACC |
| 4201 | TCAGA GTCGG CAACC CCGGA GTCTG GACCC GGAAC TTCCG AAAGT GCCAC |
| 4251 | ACCAG AGTCC GGTCC CGGGA CTTCA GAATC AGCAA CACCC GAGTC CGGCC |
| 4301 | CTGGG TCTGA ACCCG CCACA AGTGG TAGTG AGACA CCAGG ATCAG AACCT |
| 4351 | GCTAC CTCAG GGTCA GAGAC ACCCG GATCT CCGGC AGGCT CACCA ACCTC |
| 4401 | CACTG AGGAG GGCAC CAGCA CAGAA CCAAG CGAGG GCTCC GCACC CGGAA |
| 4451 | CAAGC ACTGA ACCCA GTGAG GGTTC AGCAC CCGGC TCTGA GCCGG CCACA |
| 4501 | AGTGG CAGTG AGACA CCCGG CACTT CAGAG AGTGC CACCC CCGAG AGTGG |
| 4551 | CCCAG GCACT AGTAC CGAGC CCTCT GAAGG CAGTG CGCCA GATTC TGGCG |
| 4601 | GTGGA GGTTC CGGTG GCGGG GGATC CGGTG GCGGG GGATC CGGTG GCGGG |
| 4651 | GGATC CGGTG GCGGG GGATC CCTGG TCCCC CGGGG CAGCG GAGGC GACAA |
| 4701 | AACTC ACACA TGCCC ACCGT GCCCA GCTCC AGAAC TCCTG GGCGG ACCGT |
| 4751 | CAGTC TTCCT CTTCC CCCCA AAACC CAAGG ACACC CTCAT GGCCT CCCGG |
| 4801 | ACCCC TGAGG TCACA TGCGT GGTGG TGGAC GTGAG CCACG AAGAC CCTGA |
| 4851 | GGTCA AGTTC AACTG GTACG TGGAC GGCGT GGAGG TGCAT AATGC CAAGA |
| 4901 | CAAAG CCGCG GGAGG AGCAG TACAA CAGCA CGTAC CGTGT GGTCA GCGTC |
| 4951 | CTCAC CGTCC TGGCC CAGGA CTGGC TGAAT GGCAA GGAGT ACAAG TGCAA |
| 5001 | GGTCT CCAAC AAAGC CCTCC CAGCC CCCAT CGAGA AAACC ATCTC CAAAG |
| 5051 | CCAAA GGGCA GCCCC GAGAA CCACA GGTGT ACACC CTGCC CCCAT CCCGC |
| 5101 | GATGA GCTGA CCAAG AACCA GGTCA GCCTG ACCTG CCTGG TCAAA GGCTT |
| 5151 | CTATC CCAGC GACAT CGCCG TGGAG TGGGA GAGCA ATGGG CAGCC GGAGA |
| 5201 | ACAAC TACAA GACCA CGCCT CCCGT GTTGG ACTCC GACGG CTCCT TCTTC |
| 5251 | CTCTA CAGCA AGCTC ACCGT GGACA AGAGC AGGTG GCAGC AGGGG AACGT |
| 5301 | CTTCT CATGC TCCGT GATGC ATGAG GCTCT GCACA ACGCC TACAC GCAGA |
| 5351 | AGAGC CTCTC CCTGT CTCCG GGTAA ATGA |

VWF058 Protein Sequence (VWF034 with IHH Mutation) (SEQ ID NO: 154)

| | |
|---|---|
| 1 | MIPARFAGVL LALALILPGT LCAEGTRGRS STARCSLFGS DFVNTFDGSM |
| 51 | YSFAGYCSYL LAGGCQKRSF SIIGDFQNGK RVSLSVYLGE FFDIHLFVNG |
| 101 | TVTQGDQRVS MPYASKGLYL ETEAGYYKLS GEAYGFVARI DGSGNFQVLL |
| 151 | SDRYFNKTCG LCGNFNIFAE DDFMTQEGTL TSDPYDFANS WALSSGEQWC |
| 201 | ERASPPSSSC NISSGEMQKG LWEQCQLLKS TSVFARCHPL VDPEPFVALC |
| 251 | EKTLCECAGG LECACPALLE YARTCAQEGM VLYGWTDHSA CSPVCPAGME |
| 301 | YRQCVSPCAR TCQSLHINEM CQERCVDGCS CPEGQLLDEG LCVESTECPC |
| 351 | VHSGKRYPPG TSLSRDCNTC ICRNSQWICS NEECPGECLV TGQSHFKSFD |
| 401 | NRYFTFSGIC QYLLARDCQD HSFSIVIETV QCADDRDAVC TRSVTVRLPG |
| 451 | LHNSLVKLKH GAGVAMDGQD IQLPLLKGDL RIQHTVTASV RLSYGEDLQM |
| 501 | DWDGRGRLLV KLSPVYAGKT CGLCGNYNGN QGDDFLTPSG LAEPRVEDFG |
| 551 | NAWKLHGDCQ DLQKQHSDPC ALNPRMTRFS EEACAVLTSP TFEACHRAVS |
| 601 | PLPYLRNCRY DVCSCSDGRE CLCGALASYA AACAGRGVRV AWREPGRCEL |
| 651 | NCPKGQVYLQ CGTPCNLTCR SLSYPDEECN EACLEGCFCP PGLYMDERGD |
| 701 | CVPKAQCPCY YDGEIFQPED IFSDHHTMCY CEDGFMHCTM SGVPGSLLPD |
| 751 | AVLSSPLSHR SKRSLSCRPP MVKLVCPADN LRAEGLECTK TCQNYDLECM |
| 801 | SMGCVSGCLC PPGMVRHENR CVALERCPCF HQGKEYAPGE TVKIGCNTCV |
| 851 | CRDRKWNCTD HVCDATCSTI GMAHYLTFDG LKYLFPGECQ YVLVQDYCGS |
| 901 | NPGTFRILVG NKGCSHPSVK CKKRVTILVE GGEIELFDGE VNVKRPMKDE |
| 951 | THFEVVESGR YIILLLGKAL SVVWDRHLSI SVVLKQTYQE KVCGLCGNFD |
| 1001 | GIQNNDLTSS NLQVEEDPVD FGNSWKVSSQ CADTRKVPLD SSPATCHNNI |
| 1051 | MKQTMVDSSC RILTSDVFQD CNKLVDPEPY LDVCIYDTCS CESIGDCAAF |
| 1101 | CDTIAAYAHV CAQHGKVVTW RTATLCPQSC EERNLRENGY EAEWRYNSCA |
| 1151 | PACQVTCQHP EPLACPVQCV EGCHAHCPPG KILDELLQTC VDPEDCPVCE |
| 1201 | VAGRRFASGK KVTLNPSDPE HCQICHCDVV NLTCEACQEP ISGTSESATP |
| 1251 | ESGPGSEPAT SGSETPGTSE SATPESGPGS EPATSGSETP GTSESATPES |
| 1301 | GPGTSTEPSE GSAPGSPAGS PTSTEEGTSE SATPESGPGS EPATSGSETP |
| 1351 | GTSESATPES GPGSPAGSPT STEEGSPAGS PTSTEEGTST EPSEGSAPGT |
| 1401 | SESATPESGP GTSESATPES GPGTSESATP ESGPGSEPAT SGSETPGSEP |
| 1451 | ATSGSETPGS PAGSPTSTEE GTSTEPSEGS APGTSTEPSE GSAPGSEPAT |
| 1501 | SGSETPGTSE SATPESGPGT STEPSEGSAP DSGGGGSGGG GSGGGGSGGG |
| 1551 | GSGGGGSLVP RGSGGDKTHT CPPCPAPELL GGPSVFLFPP KPKDTLMASR |
| 1601 | TPEVTCVVVD VSHEDPEVKF NWYVDGVEVH NAKTKPREEQ YNSTYRVVSV |
| 1651 | LTVLAQDWLN GKEYKCKVSN KALPAPIEKT ISKAKGQPRE PQVYTLPPSR |
| 1701 | DELTKNQVSL TCLVKGFYPS DIAVEWESNG QPENNYKTTP PVLDSDGSFF |
| 1751 | LYSKLTVDKS RWQQGNVFSC SVMHEALHNA YTQKSLSLSP GK* |

### FVIII 169 Nucleotide Sequence (SEQ ID NO: 155)

| | |
|---|---|
| 1 | ATGCA AATAG AGCTC TCCAC CTGCT TCTTT CTGTG CCTTT TGCGA TTCTG |
| 51 | CTTTA GTGCC ACCAG AAGAT ACTAC CTGGG TGCAG TGGAA CTGTC ATGGG |
| 101 | ACTAT ATGCA AAGTG ATCTC GGTGA GCTGC CTGTG GACGC AAGAT TTCCT |
| 151 | CCTAG AGTGC CAAAA TCTTT TCCAT TCAAC ACCTC AGTCG TGTAC AAAAA |
| 201 | GACTC TGTTT GTAGA ATTCA CGGAT CACCT TTTCA ACATC GCTAA GCCAA |
| 251 | GGCCA CCCTG GATGG GTCTG CTAGG TCCTA CCATC CAGGC TGAGG TTTAT |
| 301 | GATAC AGTGG TCATT ACACT TAAGA ACATG GCTTC CCATC CTGTC AGTCT |
| 351 | TCATG CTGTT GGTGT ATCCT ACTGG AAAGC TTCTG AGGGA GCTGA ATATG |
| 401 | ATGAT CAGAC CAGTC AAAGG GAGAA AGAAG ATGAT AAAGT CTTCC CTGGT |
| 451 | GGAAG CCATA CATAT GTCTG GCAGG TCCTG AAAGA GAATG GTCCA ATGGC |
| 501 | CTCTG ACCCA CTGTG CCTTA CCTAC TCATA TCTTT CTCAT GTGGA CCTGG |
| 551 | TAAAA GACTT GAATT CAGGC CTCAT TGGAG CCCTA CTAGT ATGTA GAGAA |
| 601 | GGGAG TCTGG CCAAG GAAAA GACAC AGACC TTGCA CAAAT TTATA CTACT |
| 651 | TTTTG CTGTA TTTGA TGAAG GGAAA AGTTG GCACT CAGAA ACAAA GAACT |
| 701 | CCTTG ATGCA GGATA GGGAT GCTGC ATCTG CTCGG GCCTG GCCTA AAATG |
| 751 | CACAC AGTCA ATGGT TATGT AAACA GGTCT CTGCC AGGTC TGATT GGATG |
| 801 | CCACA GGAAA TCAGT CTATT GGCAT GTGAT TGGAA TGGGC ACCAC TCCTG |
| 851 | AAGTG CACTC AATAT TCCTC GAAGG TCACA CATTT CTTGT GAGGA ACCAT |
| 901 | CGCCA GGCTA GCTTG GAAAT CTCGC CAATA ACTTT CCTTA CTGCT CAAAC |
| 951 | ACTCT TGATG GACCT TGGAC AGTTT CTACT GTTTT GTCAT ATCTC TTCCC |
| 1001 | ACCAA CATGA TGGCA TGGAA GCTTA TGTCA AAGTA GACAG CTGTC CAGAG |
| 1051 | GAACC CCAAC TACGA ATGAA AAATA ATGAA GAAGC GGAAG ACTAT GATGA |
| 1101 | TGATC TTACT GATTC TGAAA TGGAT GTGGT CAGGT TTGAT GATGA CAACT |
| 1151 | CTCCT TCCTT TATCC AAATT CGCTC AGTTG CCAAG AAGCA TCCTA AAACT |
| 1201 | TGGGT ACATT ACATT GCTGC TGAAG AGGAG GACTG GGACT ATGCT CCCTT |
| 1251 | AGTCC TCGCC CCCGA TGACA GAAGT TATAA AAGTC AATAT TTGAA CAATG |
| 1301 | GCCCT CAGCG GATTG GTAGG AAGTA CAAAA AAGTC CGATT TATGG CATAC |
| 1351 | ACAGA TGAAA CCTTT AAGAC TCGTG AAGCT ATTCA GCATG AATCA GGAAT |
| 1401 | CTTGG GACCT TTACT TTATG GGGAA GTTGG AGACA CACTG TTGAT TATAT |
| 1451 | TTAAG AATCA AGCAA GCAGA CCATA TAACA TCTAC CCTCA CGGAA TCACT |
| 1501 | GATGT CCGTC CTTTG TATTC AAGGA GATTA CCAAA AGGTG TAAAA CATTT |
| 1551 | GAAGG ATTTT CCAAT TCTGC CAGGA GAAAT ATTCA AATAT AAATG GACAG |
| 1601 | TGACT GTAGA AGATG GGCCA ACTAA ATCAG ATCCT CGGTG CCTGA CCCGC |
| 1651 | TATTA CTCTA GTTTC GTTAA TATGG AGAGA GATCT AGCTT CAGGA CTCAT |
| 1701 | TGGCC CTCTC CTCAT CTGCT ACAAA GAATC TGTAG ATCAA AGAGG AAACC |
| 1751 | AGATA ATGTC AGACA AGAGG AATGT CATCC TGTTT TCTGT ATTTG ATGAG |
| 1801 | AACCG AAGCT GGTAC CTCAC AGAGA ATATA CAACG CTTTC TCCCC AATCC |
| 1851 | AGCTG GAGTG CAGCT TGAGG ATCCA GAGTT CCAAG CCTCC AACAT CATGC |
| 1901 | ACAGC ATCAA TGGCT ATGTT TTTGA TAGTT TGCAG TTGTC AGTTT GTTTG |
| 1951 | CATGA GGTGG CATAC TGGTA CATTC TAAGC ATTGG AGCAC AGACT GACTT |
| 2001 | CCTTT CTGTC TTCTT CTCTG GATAT ACCTT CAAAC ACAAA ATGGT CTATG |
| 2051 | AAGAC ACACT CACCC TATTC CCATT CTCAG GAGAA ACTGT CTTCA TGTCG |
| 2101 | ATGGA AAACC CAGGT CTATG GATTC TGGGG TGCCA CAACT CAGAC TTTCG |
| 2151 | GAACA GAGGC ATGAC CGCCT TACTG AAGGT TTCTA GTTGT GACAA GAACA |
| 2201 | CTGGT GATTA TTACG AGGAC AGTTA TGAAG ATATT TCAGC ATACT TGCTG |
| 2251 | AGTAA AAACA ATGCC ATTGA ACCAA GAAGC TTCTC TCAAA ACGGC GCGCC |
| 2301 | AGGTA CCTCA GAGTC TGCTA CCCCC GAGTC AGGGC CAGGA TCAGA GCCAG |
| 2351 | CCACC TCCGG GTCTG AGACA CCCGG GACTT CCGAG AGTGC CACCC CTGAG |
| 2401 | TCCGG ACCCG GGTCC GAGCC CGCCA CTTCC GGCTC CGAAA CTCCC GGCAC |
| 2451 | AAGCG AGAGC GCTAC CCCAG AGTCA GGACC AGGAA CATCT ACAGA GCCCT |
| 2501 | CTGAA GGCTC CGCTC CAGGG TCCCC AGCCG GCAGT CCCAC TAGCA CCGAG |
| 2551 | GAGGG AACCT CTGAA AGCGC CACAC CCGAA TCAGG GCCAG GGTCT GAGCC |
| 2601 | TGCTA CCAGC GGCAG CGAGA CACCA GGCAC CTCTG AGTCC GCCAC ACCAG |
| 2651 | AGTCC GGACC CGGAT CTCCC GCTGG GAGCC CCACC TCCAC TGAGG AGGGA |
| 2701 | TCTCC TGCTG GCTCT CCAAC ATCTA CTGAG GAAGG TACCT CAACC GAGCC |
| 2751 | ATCCG AGGGA TCAGC TCCCG GCACC TCAGA GTCGG CAACC CCGGA GTCTG |
| 2801 | GACCC GGAAC TTCCG AAAGT GCCAC ACCAG AGTCC GGTCC CGGGA CTTCA |
| 2851 | GAATC AGCAA CACCC GAGTC CGGCC CTGGG TCTGA ACCCG CCACA AGTGG |
| 2901 | TAGTG AGACA CCAGG ATCAG AACCT GCTAC CTCAG GGTCA GAGAC ACCCG |
| 2951 | GATCT CCGGC AGGCT CACCA ACCTC CACTG AGGAG GGCAC CAGCA CAGAA |
| 3001 | CCAAG CGAGG GCTCC GCACC CGGAA CAAGC ACTGA ACCCA GTGAG GGTTC |
| 3051 | AGCAC CCGGC TCTGA GCCGG CCACA AGTGG CAGTG AGACA CCCGG CACTT |
| 3101 | CAGAG AGTGC CACCC CCGAG AGTGG CCCAG GCACT AGTAC CGAGC CCTCT |
| 3151 | GAAGG CAGTG CGCCA GCCTC GAGCC CACCA GTCTT GAAAC GCCAT CAAGC |
| 3201 | TGAAA TAACT CGTAC TACTC TTCAG TCAGA TCAAG AGGAA ATCGA TTATG |
| 3251 | ATGAT ACCAT ATCAG TTGAA ATGAA GAAGG AAGAT TTTGA CATTT ATGAT |
| 3301 | GAGGA TGAAA ATCAG AGCCC CCGCA GCTTT CAAAA GAAAA CACGA CACTA |
| 3351 | TTTTA TTGCT GCAGT GGAGA GGCTC TGGGA TTATG GGATG AGTAG CTCCC |
| 3401 | CACAT GTTCT AAGAA ACAGG GCTCA GAGTG GCAGT GTCCC TCAGT TCAAG |
| 3451 | AAAGT TGTTT TCCAG GAATT TACTG ATGGC TCCTT TACTC AGCCC TTATA |
| 3501 | CCGTG GAGAA CTAAA TGAAC ATTTG GGACT CCTGG GGCCA TATAT AAGAG |
| 3551 | CAGAA GTTGA AGATA ATATC ATGGT AACTT TCAGA AATCA GGCCT CTCGT |
| 3601 | CCCTA TTCCT TCTAT TCTAG CCTTA TTTCT TATGA GGAAG ATCAG AGGCA |
| 3651 | AGGAG CAGAA CCTAG AAAAA ACTTT GTCAA GCCTA ATGAA ACCAA AACTT |
| 3701 | ACTTT TGGAA AGTGC AACAT CATAT GGCAC CCACT AAAGA TGAGT TTGAC |
| 3751 | TGCAA AGCCT GGGCT TATTT CTCTG ATGTT GACCT GGAAA AAGAT GTGCA |
| 3801 | CTCAG GCCTG ATTGG ACCCC TTCTG GTCTG CCACA CTAAC ACACT GAACC |
| 3851 | CTGCT CATGG GAGAC AAGTG ACAGT ACAGG AATTT GCTCT GTTTT TCACC |
| 3901 | ATCTT TGATG AGACC AAAAG CTGGT ACTTC ACTGA AAATA TGGAA AGAAA |
| 3951 | CTGCA GGGCT CCCTG CAATA TCCAG ATGGA AGATC CCACT TTTAA AGAGA |
| 4001 | ATTAT CGCTT CCATG CAATC AATGG CTACA TAATG GATAC ACTAC CTGGC |
| 4051 | TTAGT AATGG CTCAG GATCA AAGGA TTCGA TGGTA TCTGC TCAGC ATGGG |
| 4101 | CAGCA ATGAA AACAT CCATT CTATT CATTT CAGTG GACAT GTGTT CACTG |
| 4151 | TACGA AAAAA AGAGG AGTAT AAAAT GGCAC TGTAC AATCT CTATC CAGGT |
| 4201 | GTTTT TGAGA CAGTG GAAAT GTTAC CATCC AAAGC TGGAA TTTGG CGGGT |
| 4251 | GGAAT GCCTT ATTGG CGAGC ATCTA CATGC TGGGA TGAGC ACACT TTTTC |
| 4301 | TGGTG TACAG CAATA AGTGT CAGAC TCCCC TGGGA ATGGC TTCTG GACAC |
| 4351 | ATTAG AGATT TTCAG ATTAC AGCTT CAGGA CAATA TGGAC AGTGG GCCCC |
| 4401 | AAAGC TGGCC AGACT TCATT ATTCC GGATC AATCA ATGCC TGGAG CACCA |
| 4451 | AGGAG CCCTT TTCTT GGATC AAGGT GGATC TGTTG GCACC AATGA TTATT |
| 4501 | CACGG CATCA AGACC CAGGG TGCCC GTCAG AAGTT CTCCA GCCTC TACAT |
| 4551 | CTCTC AGTTT ATCAT CATGT ATAGT CTTGA TGGGA AGAAG TGGCA GACTT |
| 4601 | ATCGA GGAAA TTCCA CTGGA ACCTT AATGG TCTTC TTTGG CAATG TGGAT |
| 4651 | TCATC TGGGA TAAAA CACAA TATTT TTAAC CCTCC AATTA TTGCT CGATA |
| 4701 | CATCC GTTTG CACCC AACTC ATTAT AGCAT TCGCA GCACT CTTCG CATGG |
| 4751 | AGTTG ATGGG CTGTG ATTTA AATAG TTGCA GCATG CCATT GGGAA TGGAG |
| 4801 | AGTAA AGCAA TATCA GATGC ACAGA TTACT GCTTC ATCCT ACTTT ACCAA |
| 4851 | TATGT TTGCC ACCTG GTCTC CTTCA AAAGC TCGAC TTCAC CTCCA AGGGA |
| 4901 | GGAGT AATGC CTGGA GACCT CAGGT GAATA ATCCA AAAGA GTGGC TGCAA |
| 4951 | GTGGA CTTCC AGAAG ACAAT GAAAG TCACA GGAGT AACTA CTCAG GGAGT |
| 5001 | AAAAT CTCTG CTTAC CAGCA TGTAT GTGAA GGAGT TCCTC ATCTC CAGCA |
| 5051 | GTCAA GATGG CCATC AGTGG ACTCT CTTTT TTCAG AATGG CAAAG TAAAG |
| 5101 | GTTTT TCAGG GAAAT CAAGA CTCCT TCACA CCTGT GGTGA ACTCT CTAGA |
| 5151 | CCCAC CGTTA CTGAC TCGCT ACCTT CGAAT TCACC CCCAG AGTTG GGTGC |
| 5201 | ACCAG ATTGC CCTGA GGATG GAGGT TCTGG GCTGC GAGGC ACAGG ACCTC |
| 5251 | TACGA CAAAA CTCAC ACATG CCCAC CGTGC CCAGC TCCAG AACTC CTGGG |
| 5301 | CGGAC CGTCA GTCTT CCTCT TCCCC CCAAA ACCCA AGGAC ACCCT CATGA |
| 5351 | TCTCC CGGAC CCCTG AGGTC ACATG CGTGG TGGTG GACGT GAGCC ACGAA |
| 5401 | GACCC TGAGG TCAAG TTCAA CTGGT ACGTG GACGG CGTGG AGGTG CATAA |
| 5451 | TGCCA AGACA AAGCC GCGGG AGGAG CAGTA CAACA GCACG TACCG TGTGG |
| 5501 | TCAGC GTCCT CACCG TCCTG CACCA GGACT GGCTG AATGG CAAGG AGTAC |
| 5551 | AAGTG CAAGG TCTCC AACAA AGCCC TCCCA GCCCC CATCG AGAAA ACCAT |
| 5601 | CTCCA AAGCC AAAGG GCAGC CCCGA GAACC ACAGG TGTAC ACCCT GCCCC |
| 5651 | CATCC CGGGA TGAGC TGACC AAGAA CCAGG TCAGC CTGAC CTGCC TGGTC |
| 5701 | AAAGG CTTCT ATCCC AGCGA CATCG CCGTG GAGTG GGAGA GCAAT GGGCA |
| 5751 | GCCGG AGAAC AACTA CAAGA CCACG CCTCC CGTGT TGGAC TCCGA CGGCT |
| 5801 | CCTTC TTCCT CTACA GCAAG CTCAC CGTGG ACAAG AGCAG GTGGC AGCAG |
| 5851 | GGGAA CGTCT TCTCA TGCTC CGTGA TGCAT GAGGC TCTGC ACAAC CACTA |
| 5901 | CACGC AGAAG AGCCT CTCCC TGTCT CCGGG TAAAT GA |

### FVIII 169 Protein Sequence (SEQ ID NO: 70)

| | |
|---|---|
| 1 | MQIELSTCFF LCLLRFCFSA TRRYYLGAVE LSWDYMQSDL GELPVDARFP |
| 51 | PRVPKSFPFN TSVVYKKTLF VEFTDHLFNI AKPRPPWMGL LGPTIQAEVY |
| 101 | DTVVITLKNM ASHPVSLHAV GVSYWKASEG AEYDDQTSQR EKEDDKVFPG |
| 151 | GSHTYVWQVL KENGPMASDP LCLTYSYLSH VDLVKDLNSG LIGALLVCRE |
| 201 | GSLAKEKTQT LHKFILLFAV FDEGKSWHSE TKNSLMQDRD AASARAWPKM |
| 251 | HTVNGYVNRS LPGLIGCHRK SVYWHVIGMG TTPEVHSIFL EGHTFLVRNH |
| 301 | RQASLEISPI TFLTAQTLLM DLGQFLLFCH ISSHQHDGME AYVKVDSCPE |
| 351 | EPQLRMKNNE EAEDYDDDLT DSEMDVVRFD DDNSPSFIQI RSVAKKHPKT |
| 401 | WVHYIAAEEE DWDYAPLVLA PDDRSYKSQY LNNGPQRIGR KYKKVRFMAY |
| 451 | TDETFKTREA IQHESGILGP LLYGEVGDTL LIIFKNQASR PYNIYPHGIT |
| 501 | DVRPLYSRRL PKGVKHLKDF PILPGEIFKY KWTVTVEDGP TKSDPRCLTR |
| 551 | YYSSFVNMER DLASGLIGPL LICYKESVDQ RGNQIMSDKR NVILFSVFDE |
| 601 | NRSWYLTENI QRFLPNPAGV QLEDPEFQAS NIMHSINGYV FDSLQLSVCL |
| 651 | HEVAYWYILS IGAQTDFLSV FFSGYTFKHK MVYEDTLTLF PFSGETVFMS |
| 701 | MENPGLWILG CHNSDFRNRG MTALLKVSSC DKNTGDYYED SYEDISAYLL |
| 751 | SKNNAIEPRS FSQNGAPGTS ESATPESGPG SEPATSGSET PGTSESATPE |
| 801 | SGPGSEPATS GSETPGTSES ATPESGPGTS TEPSEGSAPG SPAGSPTSTE |
| 851 | EGTSESATPE SGPGSEPATS GSETPGTSES ATPESGPGSP AGSPTSTEEG |
| 901 | SPAGSPTSTE EGTSTEPSEG SAPGTSESAT PESGPGTSES ATPESGPGTS |
| 951 | ESATPESGPG SEPATSGSET PGSEPATSGS ETPGSPAGSP TSTEEGTSTE |
| 1001 | PSEGSAPGTS TEPSEGSAPG SEPATSGSET PGTSESATPE SGPGTSTEPS |
| 1051 | EGSAPASSPP VLKRHQAEIT RTTLQSDQEE IDYDDTISVE MKKEDFDIYD |
| 1101 | EDENQSPRSF QKKTRHYFIA AVERLWDYGM SSSPHVLRNR AQSGSVPQFK |
| 1151 | KVVFQEFTDG SFTQPLYRGE LNEHLGLLGP YIRAEVEDNI MVTFRNQASR |
| 1201 | PYSFYSSLIS YEEDQRQGAE PRKNFVKPNE TKTYFWKVQH HMAPTKDEFD |
| 1251 | CKAWAYFSDV DLEKDVHSGL IGPLLVCHTN TLNPAHGRQV TVQEFALFFT |
| 1301 | IFDETKSWYF TENMERNCRA PCNIQMEDPT FKENYRFHAI NGYIMDTLPG |
| 1351 | LVMAQDQRIR WYLLSMGSNE NIHSIHFSGH VFTVRKKEEY KMALYNLYPG |
| 1401 | VFETVEMLPS KAGIWRVECL IGEHLHAGMS TLFLVYSNKC QTPLGMASGH |
| 1451 | IRDFQITASG QYGQWAPKLA RLHYSGSINA WSTKEPFSWI KVDLLAPMII |
| 1501 | HGIKTQGARQ KFSSLYISQF IIMYSLDGKK WQTYRGNSTG TLMVFFGNVD |
| 1551 | SSGIKHNIFN PPIIARYIRL HPTHYSIRST LRMELMGCDL NSCSMPLGME |
| 1601 | SKAISDAQIT ASSYFTNMFA TWSPSKARLH LQGRSNAWRP QVNNPKEWLQ |
| 1651 | VDFQKTMKVT GVTTQGVKSL LTSMYVKEFL ISSSQDGHQW TLFFQNGKVK |
| 1701 | VFQGNQDSFT PVVNSLDPPL LTRYLRIHPQ SWVHQIALRM EVLGCEAQDL |
| 1751 | YDKTHTCPPC PAPELLGGPS VFLFPPKPKD TLMISRTPEV TCVVVDVSHE |
| 1801 | DPEVKFNWYV DGVEVHNAKT KPREEQYNST YRVVSVLTVL HQDWLNGKEY |
| 1851 | KCKVSNKALP APIEKTISKA KGQPREPQVY TLPPSRDELT KNQVSLTCLV |
| 1901 | KGFYPSDIAV EWESNGQPEN NYKTTPPVLD SDGSFFLYSK LTVDKSRWQQ |
| 1951 | GNVFSCSVMH EALHNHYTQK SLSLSPGK* |

### FVIII 263 Nucleotide Sequence (IHH Triple Mutant) (SEQ ID NO: 156)

| | |
|---|---|
| 1 | ATGCA AATAG AGCTC TCCAC CTGCT TCTTT CTGTG CCTTT TGCGA TTCTG |
| 51 | CTTTA GTGCC ACCAG AAGAT ACTAC CTGGG TGCAG TGGAA CTGTC ATGGG |
| 101 | ACTAT ATGCA AGGCG CGCCA ACATC AGAGA GCGCC ACCCC TGAAA GTGGT |
| 151 | CCCGG GAGCG AGCCA GCCAC ATCTG GGTCG GAAAC GCCAG GCACA AGTGA |
| 201 | GTCTG CAACT CCCGA GTCCG GACCT GGCTC CGAGC CTGCC ACTAG CGGCT |
| 251 | CCGAG ACTCC GGGAA CTTCC GAGAG CGCTA CACCA GAAAG CGGAC CCGGA |
| 301 | ACCAG TACCG AACCT AGCGA GGGCT CTGCT CCGGG CAGCC CAGCC GGCTC |
| 351 | TCCTA CATCC ACGGA GGAGG GCACT TCCGA ATCCG CCACC CCGGA GTCAG |
| 401 | GGCCA GGATC TGAAC CCGCT ACCTC AGGCA GTGAG ACGCC AGGAA CGAGC |
| 451 | GAGTC CGCTA CACCG GAGAG TGGGC CAGGG AGCCC TGCTG GATCT CCTAC |
| 501 | GTCCA CTGAG GAAGG GTCAC CAGCG GGCTC GCCCA CCAGC ACTGA AGAAG |
| 551 | GTGCC TCGAG CAGTG ATCTC GGTGA GCTGC CTGTG GACGC AAGAT TTCCT |
| 601 | CCTAG AGTGC CAAAA TCTTT TCCAT TCAAC ACCTC AGTCG TGTAC AAAAA |
| 651 | GACTC TGTTT GTAGA ATTCA CGGAT CACCT TTTCA ACATC GCTAA GCCAA |
| 701 | GGCCA CCCTG GATGG GTCTG CTAGG TCCTA CCATC CAGGC TGAGG TTTAT |
| 751 | GATAC AGTGG TCATT ACACT TAAGA ACATG GCTTC CCATC CTGTC AGTCT |
| 801 | TCATG CTGTT GGTGT ATCCT ACTGG AAAGC TTCTG AGGGA GCTGA ATATG |
| 851 | ATGAT CAGAC CAGTC AAAGG GAGAA AGAAG ATGAT AAAGT CTTCC CTGGT |
| 901 | GGAAG CCATA CATAT GTCTG GCAGG TCCTG AAAGA GAATG GTCCA ATGGC |
| 951 | CTCTG ACCCA CTGTG CCTTA CCTAC TCATA TCTTT CTCAT GTGGA CCTGG |
| 1001 | TAAAA GACTT GAATT CAGGC CTCAT TGGAG CCCTA CTAGT ATGTA GAGAA |
| 1051 | GGGAG TCTGG CCAAG GAAAA GACAC AGACC TTGCA CAAAT TTATA CTACT |
| 1101 | TTTTG CTGTA TTTGA TGAAG GGAAA AGTTG GCACT CAGAA ACAAA GAACT |
| 1151 | CCTTG ATGCA GGATA GGGAT GCTGC ATCTG CTCGG GCCTG GCCTA AAATG |
| 1201 | CACAC AGTCA ATGGT TATGT AAACA GGTCT CTGCC AGGTC TGATT GGATG |
| 1251 | CCACA GGAAA TCAGT CTATT GGCAT GTGAT TGGAA TGGGC ACCAC TCCTG |
| 1301 | AAGTG CACTC AATAT TCCTC GAAGG TCACA CATTT CTTGT GAGGA ACCAT |
| 1351 | CGCCA GGCTA GCTTG GAAAT CTCGC CAATA ACTTT CCTTA CTGCT CAAAC |
| 1401 | ACTCT TGATG GACCT TGGAC AGTTT CTACT GTTTT GTCAT ATCTC TTCCC |
| 1451 | ACCAA CATGA TGGCA TGGAA GCTTA TGTCA AAGTA GACAG CTGTC CAGAG |
| 1501 | GAACC CCAAC TACGA ATGAA AAATA ATGAA GAAGC GGAAG ACTAT GATGA |
| 1551 | TGATC TTACT GATTC TGAAA TGGAT GTGGT CAGGT TTGAT GATGA CAACT |
| 1601 | CTCCT TCCTT TATCC AAATT CGCTC AGTTG CCAAG AAGCA TCCTA AAACT |
| 1651 | TGGGT ACATT ACATT GCTGC TGAAG AGGAG GACTG GGACT ATGCT CCCTT |
| 1701 | AGTCC TCGCC CCCGA TGACA GAAGT TATAA AAGTC AATAT TTGAA CAATG |
| 1751 | GCCCT CAGCG GATTG GTAGG AAGTA CAAAA AAGTC CGATT TATGG CATAC |
| 1801 | ACAGA TGAAA CCTTT AAGAC TCGTG AAGCT ATTCA GCATG AATCA GGAAT |
| 1851 | CTTGG GACCT TTACT TTATG GGGAA GTTGG AGACA CACTG TTGAT TATAT |
| 1901 | TTAAG AATCA AGCAA GCAGA CCATA TAACA TCTAC CCTCA CGGAA TCACT |
| 1951 | GATGT CCGTC CTTTG TATTC AAGGA GATTA CCAAA AGGTG TAAAA CATTT |
| 2001 | GAAGG ATTTT CCAAT TCTGC CAGGA GAAAT ATTCA AATAT AAATG GACAG |
| 2051 | TGACT GTAGA AGATG GGCCA ACTAA ATCAG ATCCT CGGTG CCTGA CCCGC |
| 2101 | TATTA CTCTA GTTTC GTTAA TATGG AGAGA GATCT AGCTT CAGGA CTCAT |
| 2151 | TGGCC CTCTC CTCAT CTGCT ACAAA GAATC TGTAG ATCAA AGAGG AAACC |
| 2201 | AGATA ATGTC AGACA AGAGG AATGT CATCC TGTTT TCTGT ATTTG ATGAG |
| 2251 | AACCG AAGCT GGTAC CTCAC AGAGA ATATA CAACG CTTTC TCCCC AATCC |
| 2301 | AGCTG GAGTG CAGCT TGAGG ATCCA GAGTT CCAAG CCTCC AACAT CATGC |
| 2351 | ACAGC ATCAA TGGCT ATGTT TTTGA TAGTT TGCAG TTGTC AGTTT GTTTG |
| 2401 | CATGA GGTGG CATAC TGGTA CATTC TAAGC ATTGG AGCAC AGACT GACTT |
| 2451 | CCTTT CTGTC TTCTT CTCTG GATAT ACCTT CAAAC ACAAA ATGGT CTATG |
| 2501 | AAGAC ACACT CACCC TATTC CCATT CTCAG GAGAA ACTGT CTTCA TGTCG |
| 2551 | ATGGA AAACC CAGGT CTATG GATTC TGGGG TGCCA CAACT CAGAC TTTCG |
| 2601 | GAACA GAGGC ATGAC CGCCT TACTG AAGGT TTCTA GTTGT GACAA GAACA |
| 2651 | CTGGT GATTA TTACG AGGAC AGTTA TGAAG ATATT TCAGC ATACT TGCTG |
| 2701 | AGTAA AAACA ATGCC ATTGA ACCAA GAAGC TTCTC TCAAA ACGGC GCGCC |
| 2751 | AGGTA CCTCA GAGTC TGCTA CCCCC GAGTC AGGGC CAGGA TCAGA GCCAG |
| 2801 | CCACC TCCGG GTCTG AGACA CCCGG GACTT CCGAG AGTGC CACCC CTGAG |
| 2851 | TCCGG ACCCG GGTCC GAGCC CGCCA CTTCC GGCTC CGAAA CTCCC GGCAC |
| 2901 | AAGCG AGAGC GCTAC CCCAG AGTCA GGACC AGGAA CATCT ACAGA GCCCT |
| 2951 | CTGAA GGCTC CGCTC CAGGG TCCCC AGCCG GCAGT CCCAC TAGCA CCGAG |
| 3001 | GAGGG AACCT CTGAA AGCGC CACAC CCGAA TCAGG GCCAG GGTCT GAGCC |
| 3051 | TGCTA CCAGC GGCAG CGAGA CACCA GGCAC CTCTG AGTCC GCCAC ACCAG |
| 3101 | AGTCC GGACC CGGAT CTCCC GCTGG GAGCC CCACC TCCAC TGAGG AGGGA |
| 3151 | TCTCC TGCTG GCTCT CCAAC ATCTA CTGAG GAAGG TACCT CAACC GAGCC |
| 3201 | ATCCG AGGGA TCAGC TCCCG GCACC TCAGA GTCGG CAACC CCGGA GTCTG |
| 3251 | GACCC GGAAC TTCCG AAAGT GCCAC ACCAG AGTCC GGTCC CGGGA CTTCA |
| 3301 | GAATC AGCAA CACCC GAGTC CGGCC CTGGG TCTGA ACCCG CCACA AGTGG |
| 3351 | TAGTG AGACA CCAGG ATCAG AACCT GCTAC CTCAG GGTCA GAGAC ACCCG |
| 3401 | GATCT CCGGC AGGCT CACCA ACCTC CACTG AGGAG GGCAC CAGCA CAGAA |
| 3451 | CCAAG CGAGG GCTCC GCACC CGGAA CAAGC ACTGA ACCCA GTGAG GGTTC |
| 3501 | AGCAC CCGGC TCTGA GCCGG CCACA AGTGG CAGTG AGACA CCCGG CACTT |
| 3551 | CAGAG AGTGC CACCC CCGAG AGTGG CCCAG GCACT AGTAC CGAGC CCTCT |
| 3601 | GAAGG CAGTG CGCCA GCCTC GAGCC CACCA GTCTT GAAAC GCCAT CAAGC |
| 3651 | TGAAA TAACT CGTAC TACTC TTCAG TCAGA TCAAG AGGAA ATCGA TTATG |
| 3701 | ATGAT ACCAT ATCAG TTGAA ATGAA GAAGG AAGAT TTTGA CATTT ATGAT |
| 3751 | GAGGA TGAAA ATCAG AGCCC CCGCA GCTTT CAAAA GAAAA CACGA CACTA |
| 3801 | TTTTA TTGCT GCAGT GGAGA GGCTC TGGGA TTATG GGATG AGTAG CTCCC |
| 3851 | CACAT GTTCT AAGAA ACAGG GCTCA GAGTG GCAGT GTCCC TCAGT TCAAG |
| 3901 | AAAGT TGTTT TCCAG GAATT TACTG ATGGC TCCTT TACTC AGCCC TTATA |
| 3951 | CCGTG GAGAA CTAAA TGAAC ATTTG GGACT CCTGG GGCCA TATAT AAGAG |
| 4001 | CAGAA GTTGA AGATA ATATC ATGGT AACTT TCAGA AATCA GGCCT CTCGT |
| 4051 | CCCTA TTCCT TCTAT TCTAG CCTTA TTTCT TATGA GGAAG ATCAG AGGCA |
| 4101 | AGGAG CAGAA CCTAG AAAAA ACTTT GTCAA GCCTA ATGAA ACCAA AACTT |
| 4151 | ACTTT TGGAA AGTGC AACAT CATAT GGCAC CCACT AAAGA TGAGT TTGAC |
| 4201 | TGCAA AGCCT GGGCT TATTT CTCTG ATGTT GACCT GGAAA AAGAT GTGCA |
| 4251 | CTCAG GCCTG ATTGG ACCCC TTCTG GTCTG CCACA CTAAC ACACT GAACC |
| 4301 | CTGCT CATGG GAGAC AAGTG ACAGT ACAGG AATTT GCTCT GTTTT TCACC |
| 4351 | ATCTT TGATG AGACC AAAAG CTGGT ACTTC ACTGA AAATA TGGAA AGAAA |
| 4401 | CTGCA GGGCT CCCTG CAATA TCCAG ATGGA AGATC CCACT TTTAA AGAGA |
| 4451 | ATTAT CGCTT CCATG CAATC AATGG CTACA TAATG GATAC ACTAC CTGGC |
| 4501 | TTAGT AATGG CTCAG GATCA AAGGA TTCGA TGGTA TCTGC TCAGC ATGGG |
| 4551 | CAGCA ATGAA AACAT CCATT CTATT CATTT CAGTG GACAT GTGTT CACTG |
| 4601 | TACGA AAAAA AGAGG AGTAT AAAAT GGCAC TGTAC AATCT CTATC CAGGT |
| 4651 | GTTTT TGAGA CAGTG GAAAT GTTAC CATCC AAAGC TGGAA TTTGG CGGGT |
| 4701 | GGAAT GCCTT ATTGG CGAGC ATCTA CATGC TGGGA TGAGC ACACT TTTTC |
| 4751 | TGGTG TACAG CAATA AGTGT CAGAC TCCCC TGGGA ATGGC TTCTG GACAC |
| 4801 | ATTAG AGATT TTCAG ATTAC AGCTT CAGGA CAATA TGGAC AGTGG GCCCC |
| 4851 | AAAGC TGGCC AGACT TCATT ATTCC GGATC AATCA ATGCC TGGAG CACCA |
| 4901 | AGGAG CCCTT TTCTT GGATC AAGGT GGATC TGTTG GCACC AATGA TTATT |
| 4951 | CACGG CATCA AGACC CAGGG TGCCC GTCAG AAGTT CTCCA GCCTC TACAT |
| 5001 | CTCTC AGTTT ATCAT CATGT ATAGT CTTGA TGGGA AGAAG TGGCA GACTT |
| 5051 | ATCGA GGAAA TTCCA CTGGA ACCTT AATGG TCTTC TTTGG CAATG TGGAT |
| 5101 | TCATC TGGGA TAAAA CACAA TATTT TTAAC CCTCC AATTA TTGCT CGATA |
| 5151 | CATCC GTTTG CACCC AACTC ATTAT AGCAT TCGCA GCACT CTTCG CATGG |
| 5201 | AGTTG ATGGG CTGTG ATTTA AATAG TTGCA GCATG CCATT GGGAA TGGAG |
| 5251 | AGTAA AGCAA TATCA GATGC ACAGA TTACT GCTTC ATCCT ACTTT ACCAA |
| 5301 | TATGT TTGCC ACCTG GTCTC CTTCA AAAGC TCGAC TTCAC CTCCA AGGGA |
| 5351 | GGAGT AATGC CTGGA GACCT CAGGT GAATA ATCCA AAAGA GTGGC TGCAA |
| 5401 | GTGGA CTTCC AGAAG ACAAT GAAAG TCACA GGAGT AACTA CTCAG GGAGT |
| 5451 | AAAAT CTCTG CTTAC CAGCA TGTAT GTGAA GGAGT TCCTC ATCTC CAGCA |
| 5501 | GTCAA GATGG CCATC AGTGG ACTCT CTTTT TTCAG AATGG CAAAG TAAAG |
| 5551 | GTTTT TCAGG GAAAT CAAGA CTCCT TCACA CCTGT GGTGA ACTCT CTAGA |
| 5601 | CCCAC CGTTA CTGAC TCGCT ACCTT CGAAT TCACC CCCAG AGTTG GGTGC |
| 5651 | ACCAG ATTGC CCTGA GGATG GAGGT TCTGG GCTGC GAGGC ACAGG ACCTC |
| 5701 | TACGA CAAAA CTCAC ACATG CCCAC CGTGC CCAGC TCCAG AACTC CTGGG |
| 5751 | CGGAC CGTCA GTCTT CCTCT TCCCC CCAAA ACCCA AGGAC ACCCT CATGG |
| 5801 | CCTCC CGGAC CCCTG AGGTC ACATG CGTGG TGGTG GACGT GAGCC ACGAA |
| 5851 | GACCC TGAGG TCAAG TTCAA CTGGT ACGTG GACGG CGTGG AGGTG CATAA |
| 5901 | TGCCA AGACA AAGCC GCGGG AGGAG CAGTA CAACA GCACG TACCG TGTGG |
| 5951 | TCAGC GTCCT CACCG TCCTG GCCCA GGACT GGCTG AATGG CAAGG AGTAC |
| 6001 | AAGTG CAAGG TCTCC AACAA AGCCC TCCCA GCCCC CATCG AGAAA ACCAT |
| 6051 | CTCCA AAGCC AAAGG GCAGC CCCGA GAACC ACAGG TGTAC ACCCT GCCCC |
| 6101 | CATCC CGCGA TGAGC TGACC AAGAA CCAGG TCAGC CTGAC CTGCC TGGTC |
| 6151 | AAAGG CTTCT ATCCC AGCGA CATCG CCGTG GAGTG GGAGA GCAAT GGGCA |
| 6201 | GCCGG AGAAC AACTA CAAGA CCACG CCTCC CGTGT TGGAC TCCGA CGGCT |
| 6251 | CCTTC TTCCT CTACA GCAAG CTCAC CGTGG ACAAG AGCAG GTGGC AGCAG |
| 6301 | GGGAA CGTCT TCTCA TGCTC CGTGA TGCAT GAGGC TCTGC ACAAC GCCTA |
| 6351 | CACGC AGAAG AGCCT CTCCC TGTCT CCGGG TAAAT GA |

### FVIII 263 Protein Sequence (IHH Triple Mutant) (SEQ ID NO: 157)

| | |
|---|---|
| 1 | MQIELSTCFF LCLLRFCFSA TRRYYLGAVE LSWDYMQGAP TSESATPESG |
| 51 | PGSEPATSGS ETPGTSESAT PESGPGSEPA TSGSETPGTS ESATPESGPG |
| 101 | TSTEPSEGSA PGSPAGSPTS TEEGTSESAT PESGPGSEPA TSGSETPGTS |
| 151 | ESATPESGPG SPAGSPTSTE EGSPAGSPTS TEEGASSSDL GELPVDARFP |
| 201 | PRVPKSFPFN TSVVYKKTLF VEFTDHLFNI AKPRPPWMGL LGPTIQAEVY |
| 251 | DTVVITLKNM ASHPVSLHAV GVSYWKASEG AEYDDQTSQR EKEDDKVFPG |
| 301 | GSHTYVWQVL KENGPMASDP LCLTYSYLSH VDLVKDLNSG LIGALLVCRE |
| 351 | GSLAKEKTQT LHKFILLFAV FDEGKSWHSE TKNSLMQDRD AASARAWPKM |
| 401 | HTVNGYVNRS LPGLIGCHRK SVYWHVIGMG TTPEVHSIFL EGHTFLVRNH |
| 451 | RQASLEISPI TFLTAQTLLM DLGQFLLFCH ISSHQHDGME AYVKVDSCPE |
| 501 | EPQLRMKNNE EAEDYDDDLT DSEMDVVRFD DDNSPSFIQI RSVAKKHPKT |
| 551 | WVHYIAAEEE DWDYAPLVLA PDDRSYKSQY LNNGPQRIGR KYKKVRFMAY |
| 601 | TDETFKTREA IQHESGILGP LLYGEVGDTL LIIFKNQASR PYNIYPHGIT |
| 651 | DVRPLYSRRL PKGVKHLKDF PILPGEIFKY KWTVTVEDGP TKSDPRCLTR |
| 701 | YYSSFVNMER DLASGLIGPL LICYKESVDQ RGNQIMSDKR NVILFSVFDE |
| 751 | NRSWYLTENI QRFLPNPAGV QLEDPEFQAS NIMHSINGYV FDSLQLSVCL |
| 801 | HEVAYWYILS IGAQTDFLSV FFSGYTFKHK MVYEDTLTLF PFSGETVFMS |
| 851 | MENPGLWILG CHNSDFRNRG MTALLKVSSC DKNTGDYYED SYEDISAYLL |
| 901 | SKNNAIEPRS FSQNGAPGTS ESATPESGPG SEPATSGSET PGTSESATPE |
| 951 | SGPGSEPATS GSETPGTSES ATPESGPGTS TEPSEGSAPG SPAGSPTSTE |
| 1001 | EGTSESATPE SGPGSEPATS GSETPGTSES ATPESGPGSP AGSPTSTEEG |
| 1051 | SPAGSPTSTE EGTSTEPSEG SAPGTSESAT PESGPGTSES ATPESGPGTS |
| 1101 | ESATPESGPG SEPATSGSET PGSEPATSGS ETPGSPAGSP TSTEEGTSTE |
| 1151 | PSEGSAPGTS TEPSEGSAPG SEPATSGSET PGTSESATPE SGPGTSTEPS |
| 1201 | EGSAPASSPP VLKRHQAEIT RTTLQSDQEE IDYDDTISVE MKKEDFDIYD |
| 1251 | EDENQSPRSF QKKTRHYFIA AVERLWDYGM SSSPHVLRNR AQSGSVPQFK |
| 1301 | KVVFQEFTDG SFTQPLYRGE LNEHLGLLGP YIRAEVEDNI MVTFRNQASR |
| 1351 | PYSFYSSLIS YEEDQRQGAE PRKNFVKPNE TKTYFWKVQH HMAPTKDEFD |
| 1401 | CKAWAYFSDV DLEKDVHSGL IGPLLVCHTN TLNPAHGRQV TVQEFALFFT |
| 1451 | IFDETKSWYF TENMERNCRA PCNIQMEDPT FKENYRFHAI NGYIMDTLPG |
| 1501 | LVMAQDQRIR WYLLSMGSNE NIHSIHFSGH VFTVRKKEEY KMALYNLYPG |
| 1551 | VFETVEMLPS KAGIWRVECL IGEHLHAGMS TLFLVYSNKC QTPLGMASGH |
| 1601 | IRDFQITASG QYGQWAPKLA RLHYSGSINA WSTKEPFSWI KVDLLAPMII |
| 1651 | HGIKTQGARQ KFSSLYISQF IIMYSLDGKK WQTYRGNSTG TLMVFFGNVD |
| 1701 | SSGIKHNIFN PPIIARYIRL HPTHYSIRST LRMELMGCDL NSCSMPLGME |
| 1751 | SKAISDAQIT ASSYFTNMFA TWSPSKARLH LQGRSNAWRP QVNNPKEWLQ |
| 1801 | VDFQKTMKVT GVTTQGVKSL LTSMYVKEFL ISSSQDGHQW TLFFQNGKVK |
| 1851 | VFQGNQDSFT PVVNSLDPPL LTRYLRIHPQ SWVHQIALRM EVLGCEAQDL |
| 1901 | YDKTHTCPPC PAPELLGGPS VFLFPPKPKD TLMASRTPEV TCVVVDVSHE |
| 1951 | DPEVKFNWYV DGVEVHNAKT KPREEQYNST YRVVSVLTVL AQDWLNGKEY |
| 2001 | KCKVSNKALP APIEKTISKA KGQPREPQVY TLPPSRDELT KNQVSLTCLV |
| 2051 | KGFYPSDIAV EWESNGQPEN NYKTTPPVLD SDGSFFLYSK LTVDKSRWQQ |
| 2101 | GNVFSCSVMH EALHNAYTQK SLSLSPGK* |

### FVIII 282 Nucleotide Sequence (SEQ ID NO: 158)

| | |
|---|---|
| 1 | ATGCA AATAG AGCTC TCCAC CTGCT TCTTT CTGTG CCTTT TGCGA TTCTG |
| 51 | CTTTA GTGCC ACCAG AAGAT ACTAC CTGGG TGCAG TGGAA CTGTC ATGGG |
| 101 | ACTAT ATGCA AAGTG ATCTC GGTGA GCTGC CTGTG GACGC AAGAT TTCCT |
| 151 | CCTAG AGTGC CAAAA TCTTT TCCAT TCAAC ACCTC AGTCG TGTAC AAAAA |
| 201 | GACTC TGTTT GTAGA ATTCA CGGAT CACCT TTTCA ACATC GCTAA GCCAA |
| 251 | GGCCA CCCTG GATGG GTCTG CTAGG TCCTA CCATC CAGGC TGAGG TTTAT |
| 301 | GATAC AGTGG TCATT ACACT TAAGA ACATG GCTTC CCATC CTGTC AGTCT |
| 351 | TCATG CTGTT GGTGT ATCCT ACTGG AAAGC TTCTG AGGGA GCTGA ATATG |
| 401 | ATGAT CAGAC CAGTC AAAGG GAGAA AGAAG ATGAT AAAGT CTTCC CTGGT |
| 451 | GGAAG CCATA CATAT GTCTG GCAGG TCCTG AAAGA GAATG GTCCA ATGGC |
| 501 | CTCTG ACCCA CTGTG CCTTA CCTAC TCATA TCTTT CTCAT GTGGA CCTGG |
| 551 | TAAAA GACTT GAATT CAGGC CTCAT TGGAG CCCTA CTAGT ATGTA GAGAA |
| 601 | GGGAG TCTGG CCAAG GAAAA GACAC AGACC TTGCA CAAAT TTATA CTACT |
| 651 | TTTTG CTGTA TTTGA TGAAG GGAAA AGTTG GCACT CAGAA ACAAA GAACT |
| 701 | CCTTG ATGCA GGATA GGGAT GCTGC ATCTG CTCGG GCCTG GCCTA AAATG |
| 751 | CACAC AGTCA ATGGT TATGT AAACA GGTCT CTGCC AGGTC TGATT GGATG |
| 801 | CCACA GGAAA TCAGT CTATT GGCAT GTGAT TGGAA TGGGC ACCAC TCCTG |
| 851 | AAGTG CACTC AATAT TCCTC GAAGG TCACA CATTT CTTGT GAGGA ACCAT |
| 901 | CGCCA GGCTA GCTTG GAAAT CTCGC CAATA ACTTT CCTTA CTGCT CAAAC |
| 951 | ACTCT TGATG GACCT TGGAC AGTTT CTACT GTTTT GTCAT ATCTC TTCCC |
| 1001 | ACCAA CATGA TGGCA TGGAA GCTTA TGTCA AAGTA GACAG CTGTC CAGAG |
| 1051 | GAACC CCAAC TACGA ATGAA AAATA ATGAA GAAGC GGAAG ACTAT GATGA |
| 1101 | TGATC TTACT GATTC TGAAA TGGAT GTGGT CAGGT TTGAT GATGA CAACT |
| 1151 | CTCCT TCCTT TATCC AAATT CGCTC AGTTG CCAAG AAGCA TCCTA AAACT |
| 1201 | TGGGT ACATT ACATT GCTGC TGAAG AGGAG GACTG GGACT ATGCT CCCTT |
| 1251 | AGTCC TCGCC CCCGA TGACA GAAGT TATAA AAGTC AATAT TTGAA CAATG |
| 1301 | GCCCT CAGCG GATTG GTAGG AAGTA CAAAA AAGTC CGATT TATGG CATAC |
| 1351 | ACAGA TGAAA CCTTT AAGAC TCGTG AAGCT ATTCA GCATG AATCA GGAAT |
| 1401 | CTTGG GACCT TTACT TTATG GGGAA GTTGG AGACA CACTG TTGAT TATAT |
| 1451 | TTAAG AATCA AGCAA GCAGA CCATA TAACA TCTAC CCTCA CGGAA TCACT |
| 1501 | GATGT CCGTC CTTTG TATTC AAGGA GATTA CCAAA AGGTG TAAAA CATTT |
| 1551 | GAAGG ATTTT CCAAT TCTGC CAGGA GAAAT ATTCA AATAT AAATG GACAG |
| 1601 | TGACT GTAGA AGATG GGCCA ACTAA ATCAG ATCCT CGGTG CCTGA CCCGC |
| 1651 | TATTA CTCTA GTTTC GTTAA TATGG AGAGA GATCT AGCTT CAGGA CTCAT |
| 1701 | TGGCC CTCTC CTCAT CTGCT ACAAA GAATC TGTAG ATCAA AGAGG AAACC |
| 1751 | AGATA ATGTC AGACA AGAGG AATGT CATCC TGTTT TCTGT ATTTG ATGAG |
| 1801 | AACCG AAGCT GGTAC CTCAC AGAGA ATATA CAACG CTTTC TCCCC AATCC |
| 1851 | AGCTG GAGTG CAGCT TGAGG ATCCA GAGTT CCAAG CCTCC AACAT CATGC |
| 1901 | ACAGC ATCAA TGGCT ATGTT TTTGA TAGTT TGCAG TTGTC AGTTT GTTTG |
| 1951 | CATGA GGTGG CATAC TGGTA CATTC TAAGC ATTGG AGCAC AGACT GACTT |
| 2001 | CCTTT CTGTC TTCTT CTCTG GATAT ACCTT CAAAC ACAAA ATGGT CTATG |
| 2051 | AAGAC ACACT CACCC TATTC CCATT CTCAG GAGAA ACTGT CTTCA TGTCG |
| 2101 | ATGGA AAACC CAGGT CTATG GATTC TGGGG TGCCA CAACT CAGAC TTTCG |
| 2151 | GAACA GAGGC ATGAC CGCCT TACTG AAGGT TTCTA GTTGT GACAA GAACA |
| 2201 | CTGGT GATTA TTACG AGGAC AGTTA TGAAG ATATT TCAGC ATACT TGCTG |
| 2251 | AGTAA AAACA ATGCC ATTGA ACCAA GAAGC TTCTC TCAAA ACGGC GCGCC |
| 2301 | AACAT CAGAG AGCGC CACCC CTGAA AGTGG TCCCG GGAGC GAGCC AGCCA |
| 2351 | CATCT GGGTC GGAAA CGCCA GGCAC AAGTG AGTCT GCAAC TCCCG AGTCC |
| 2401 | GGACC TGGCT CCGAG CCTGC CACTA GCGGC TCCGA GACTC CGGGA ACTTC |
| 2451 | CGAGA GCGCT ACACC AGAAA GCGGA CCCGG AACCA GTACC GAACC TAGCG |
| 2501 | AGGGC TCTGC TCCGG GCAGC CCAGC CGGCT CTCCT ACATC CACGG AGGAG |
| 2551 | GGCAC TTCCG AATCC GCCAC CCCGG AGTCA GGGCC AGGAT CTGAA CCCGC |
| 2601 | TACCT CAGGC AGTGA GACGC CAGGA ACGAG CGAGT CCGCT ACACC GGAGA |
| 2651 | GTGGG CCAGG GAGCC CTGCT GGATC TCCTA CGTCC ACTGA GGAAG GGTCA |
| 2701 | CCAGC GGGCT CGCCC ACCAG CACTG AAGAA GGTGC CTCGA GCCCA CCAGT |
| 2751 | CTTGA AACGC CATCA AGCTG AAATA ACTCG TACTA CTCTT CAGTC AGATC |
| 2801 | AAGAG GAAAT CGATT ATGAT GATAC CATAT CAGTT GAAAT GAAGA AGGAA |
| 2851 | GATTT TGACA TTTAT GATGA GGATG AAAAT CAGAG CCCCC GCAGC TTTCA |
| 2901 | AAAGA AAACA CGACA CTATT TTATT GCTGC AGTGG AGAGG CTCTG GGATT |
| 2951 | ATGGG ATGAG TAGCT CCCCA CATGT TCTAA GAAAC AGGGC TCAGA GTGGC |
| 3001 | AGTGT CCCTC AGTTC AAGAA AGTTG TTTTC CAGGA ATTTA CTGAT GGCTC |
| 3051 | CTTTA CTCAG CCCTT ATACC GTGGA GAACT AAATG AACAT TTGGG ACTCC |
| 3101 | TGGGG CCATA TATAA GAGCA GAAGT TGAAG ATAAT ATCAT GGTAA CTTTC |
| 3151 | AGAAA TCAGG CCTCT CGTCC CTATT CCTTC TATTC TAGCC TTATT TCTTA |
| 3201 | TGAGG AAGAT CAGAG GCAAG GAGCA GAACC TAGAA AAAAC TTTGT CAAGC |
| 3251 | CTAAT GAAAC CAAAA CTTAC TTTTG GAAAG TGCAA CATCA TATGG CACCC |
| 3301 | ACTAA AGATG AGTTT GACTG CAAAG CCTGG GCTTA TTTCT CTGAT GTTGA |
| 3351 | CCTGG AAAAA GATGT GCACT CAGGC CTGAT TGGAC CCCTT CTGGT CTGCC |
| 3401 | ACACT AACAC ACTGA ACCCT GCTCA TGGGA GACAA GTGAC AGTAC AGGAA |
| 3451 | TTTGC TCTGT TTTTC ACCAT CTTTG ATGAG ACCAA AAGCT GGTAC TTCAC |
| 3501 | TGAAA ATATG GAAAG AAACT GCAGG GCTCC CTGCA ATATC CAGAT GGAAG |
| 3551 | ATCCC ACTTT TAAAG AGAAT TATCG CTTCC ATGCA ATCAA TGGCT ACATA |
| 3601 | ATGGA TACAC TACCT GGCTT AGTAA TGGCT CAGGA TCAAA GGATT CGATG |
| 3651 | GTATC TGCTC AGCAT GGGCA GCAAT GAAAA CATCC ATTCT ATTCA TTTCA |
| 3701 | GTGGA CATGT GTTCA CTGTA CGAAA AAAAG AGGAG TATAA AATGG CACTG |
| 3751 | TACAA TCTCT ATCCA GGTGT TTTTG AGACA GTGGA AATGT TACCA TCCAA |
| 3801 | AGCTG GAATT TGGCG GGTGG AATGC CTTAT TGGCG AGCAT CTACA TGCTG |
| 3851 | GGATG AGCAC ACTTT TTCTG GTGTA CAGCA ATAAG TGTCA GACTC CCCTG |
| 3901 | GGAAT GGCTT CTGGA CACAT TAGAG ATTTT CAGAT TACAG CTTCA GGACA |
| 3951 | ATATG GACAG TGGGC CCCAA AGCTG GCCAG ACTTC ATTAT TCCGG ATCAA |
| 4001 | TCAAT GCCTG GAGCA CCAAG GAGCC CTTTT CTTGG ATCAA GGTGG ATCTG |
| 4051 | TTGGC ACCAA TGATT ATTCA CGGCA TCAAG ACCCA GGGTG CCCGT CAGAA |
| 4101 | GTTCT CCAGC CTCTA CATCT CTCAG TTTAT CATCA TGTAT AGTCT TGATG |
| 4151 | GGAAG AAGTG GCAGA CTTAT CGAGG AAATT CCACT GGAAC CTTAA TGGTC |
| 4201 | TTCTT TGGCA ATGTG GATTC ATCTG GGATA AAACA CAATA TTTTT AACCC |
| 4251 | TCCAA TTATT GCTCG ATACA TCCGT TTGCA CCCAA CTCAT TATAG CATTC |
| 4301 | GCAGC ACTCT TCGCA TGGAG TTGAT GGGCT GTGAT TTAAA TAGTT GCAGC |
| 4351 | ATGCC ATTGG GAATG GAGAG TAAAG CAATA TCAGA TGCAC AGATT ACTGC |
| 4401 | TTCAT CCTAC TTTAC CAATA TGTTT GCCAC CTGGT CTCCT TCAAA AGCTC |
| 4451 | GACTT CACCT CCAAG GGAGG AGTAA TGCCT GGAGA CCTCA GGTGA ATAAT |
| 4501 | CCAAA AGAGT GGCTG CAAGT GGACT TCCAG AAGAC AATGA AAGTC ACAGG |
| 4551 | AGTAA CTACT CAGGG AGTAA AATCT CTGCT TACCA GCATG TATGT GAAGG |
| 4601 | AGTTC CTCAT CTCCA GCAGT CAAGA TGGCC ATCAG TGGAC TCTCT TTTTT |
| 4651 | CAGAA TGGCA AAGTA AAGGT TTTTC AGGGA AATCA AGACT CCTTC ACACC |
| 4701 | TGTGG TGAAC TCTCT AGACC CACCG TTACT GACTC GCTAC CTTCG AATTC |
| 4751 | ACCCC CAGAG TTGGG TGCAC CAGAT TGCCC TGAGG ATGGA GGTTC TGGGC |
| 4801 | TGCGA GGCAC AGGAC CTCTA CGACA AAACT CACAC ATGCC CACCG TGCCC |
| 4851 | AGCTC CAGAA CTCCT GGGCG GACCG TCAGT CTTCC TCTTC CCCCC AAAAC |
| 4901 | CCAAG GACAC CCTCA TGATC TCCCG GACCC CTGAG GTCAC ATGCG TGGTG |
| 4951 | GTGGA CGTGA GCCAC GAAGA CCCTG AGGTC AAGTT CAACT GGTAC GTGGA |
| 5001 | CGGCG TGGAG GTGCA TAATG CCAAG ACAAA GCCGC GGGAG GAGCA GTACA |
| 5051 | ACAGC ACGTA CCGTG TGGTC AGCGT CCTCA CCGTC CTGCA CCAGG ACTGG |
| 5101 | CTGAA TGGCA AGGAG TACAA GTGCA AGGTC TCCAA CAAAG CCCTC CCAGC |
| 5151 | CCCCA TCGAG AAAAC CATCT CCAAA GCCAA AGGGC AGCCC CGAGA ACCAC |
| 5201 | AGGTG TACAC CCTGC CCCCA TCCCG GGATG AGCTG ACCAA GAACC AGGTC |
| 5251 | AGCCT GACCT GCCTG GTCAA AGGCT TCTAT CCCAG CGACA TCGCC GTGGA |
| 5301 | GTGGG AGAGC AATGG GCAGC CGGAG AACAA CTACA AGACC ACGCC TCCCG |
| 5351 | TGTTG GACTC CGACG GCTCC TTCTT CCTCT ACAGC AAGCT CACCG TGGAC |
| 5401 | AAGAG CAGGT GGCAG CAGGG GAACG TCTTC TCATG CTCCG TGATG CATGA |
| 5451 | GGCTC TGCAC AACCA CTACA CGCAG AAGAG CCTCT CCCTG TCTCC GGGTA |
| 5501 | AATGA |

### FVIII 282 Protein Sequence (SEQ ID NO: 159)

| | |
|---|---|
| 1 | MQIELSTCFF LCLLRFCFSA TRRYYLGAVE LSWDYMQSDL GELPVDARFP |
| 51 | PRVPKSFPFN TSVVYKKTLF VEFTDHLFNI AKPRPPWMGL LGPTIQAEVY |
| 101 | DTVVITLKNM ASHPVSLHAV GVSYWKASEG AEYDDQTSQR EKEDDKVFPG |
| 151 | GSHTYVWQVL KENGPMASDP LCLTYSYLSH VDLVKDLNSG LIGALLVCRE |
| 201 | GSLAKEKTQT LHKFILLFAV FDEGKSWHSE TKNSLMQDRD AASARAWPKM |
| 251 | HTVNGYVNRS LPGLIGCHRK SVYWHVIGMG TTPEVHSIFL EGHTFLVRNH |
| 301 | RQASLEISPI TFLTAQTLLM DLGQFLLFCH ISSHQHDGME AYVKVDSCPE |
| 351 | EPQLRMKNNE EAEDYDDDLT DSEMDVVRFD DDNSPSFIQI RSVAKKHPKT |
| 401 | WVHYIAAEEE DWDYAPLVLA PDDRSYKSQY LNNGPQRIGR KYKKVRFMAY |
| 451 | TDETFKTREA IQHESGILGP LLYGEVGDTL LIIFKNQASR PYNIYPHGIT |
| 501 | DVRPLYSRRL PKGVKHLKDF PILPGEIFKY KWTVTVEDGP TKSDPRCLTR |
| 551 | YYSSFVNMER DLASGLIGPL LICYKESVDQ RGNQIMSDKR NVILFSVFDE |
| 601 | NRSWYLTENI QRFLPNPAGV QLEDPEFQAS NIMHSINGYV FDSLQLSVCL |
| 651 | HEVAYWYILS IGAQTDFLSV FFSGYTFKHK MVYEDTLTLF PFSGETVFMS |
| 701 | MENPGLWILG CHNSDFRNRG MTALLKVSSC DKNTGDYYED SYEDISAYLL |
| 751 | SKNNAIEPRS FSQNGAPTSE SATPESGPGS EPATSGSETP GTSESATPES |
| 801 | GPGSEPATSG SETPGTSESA TPESGPGTST EPSEGSAPGS PAGSPTSTEE |
| 851 | GTSESATPES GPGSEPATSG SETPGTSESA TPESGPGSPA GSPTSTEEGS |
| 901 | PAGSPTSTEE GASSPPVLKR HQAEITRTTL QSDQEEIDYD DTISVEMKKE |
| 951 | DFDIYDEDEN QSPRSFQKKT RHYFIAAVER LWDYGMSSSP HVLRNRAQSG |
| 1001 | SVPQFKKVVF QEFTDGSFTQ PLYRGELNEH LGLLGPYIRA EVEDNIMVTF |
| 1051 | RNQASRPYSF YSSLISYEED QRQGAEPRKN FVKPNETKTY FWKVQHHMAP |
| 1101 | TKDEFDCKAW AYFSDVDLEK DVHSGLIGPL LVCHTNTLNP AHGRQVTVQE |
| 1151 | FALFFTIFDE TKSWYFTENM ERNCRAPCNI QMEDPTFKEN YRFHAINGYI |
| 1201 | MDTLPGLVMA QDQRIRWYLL SMGSNENIHS IHFSGHVFTV RKKEEYKMAL |
| 1251 | YNLYPGVFET VEMLPSKAGI WRVECLIGEH LHAGMSTLFL VYSNKCQTPL |
| 1301 | GMASGHIRDF QITASGQYGQ WAPKLARLHY SGSINAWSTK EPFSWIKVDL |
| 1351 | LAPMIIHGIK TQGARQKFSS LYISQFIIMY SLDGKKWQTY RGNSTGTLMV |
| 1401 | FFGNVDSSGI KHNIFNPPII ARYIRLHPTH YSIRSTLRME LMGCDLNSCS |
| 1451 | MPLGMESKAI SDAQITASSY FTNMFATWSP SKARLHLQGR SNAWRPQVNN |
| 1501 | PKEWLQVDFQ KTMKVTGVTT QGVKSLLTSM YVKEFLISSS QDGHQWTLFF |
| 1551 | QNGKVKVFQG NQDSFTPVVN SLDPPLLTRY LRIHPQSWVH QIALRMEVLG |
| 1601 | CEAQDLYDKT HTCPPCPAPE LLGGPSVFLF PPKPKDTLMI SRTPEVTCVV |
| 1651 | VDVSHEDPEV KFNWYVDGVE VHNAKTKPRE EQYNSTYRVV SVLTVLHQDW |
| 1701 | LNGKEYKCKV SNKALPAPIE KTISKAKGQP REPQVYTLPP SRDELTKNQV |
| 1751 | SLTCLVKGFY PSDIAVEWES NGQPENNYKT TPPVLDSDGS FFLYSKLTVD |
| 1801 | KSRWQQGNVF SCSVMHEALH NHYTQKSLSL SPGK* |

FVIII 283 Nucleotide Sequence (FVIII 169 with IHH Triple Mutation) (SEQ ID NO: 160)

| | |
|---|---|
| 1 | ATGCA AATAG AGCTC TCCAC CTGCT TCTTT CTGTG CCTTT TGCGA TTCTG |
| 51 | CTTTA GTGCC ACCAG AAGAT ACTAC CTGGG TGCAG TGGAA CTGTC ATGGG |
| 101 | ACTAT ATGCA AAGTG ATCTC GGTGA GCTGC CTGTG GACGC AAGAT TTCCT |
| 151 | CCTAG AGTGC CAAAA TCTTT TCCAT TCAAC ACCTC AGTCG TGTAC AAAAA |
| 201 | GACTC TGTTT GTAGA ATTCA CGGAT CACCT TTTCA ACATC GCTAA GCCAA |
| 251 | GGCCA CCCTG GATGG GTCTG CTAGG TCCTA CCATC CAGGC TGAGG TTTAT |
| 301 | GATAC AGTGG TCATT ACACT TAAGA ACATG GCTTC CCATC CTGTC AGTCT |
| 351 | TCATG CTGTT GGTGT ATCCT ACTGG AAAGC TTCTG AGGGA GCTGA ATATG |
| 401 | ATGAT CAGAC CAGTC AAAGG GAGAA AGAAG ATGAT AAAGT CTTCC CTGGT |
| 451 | GGAAG CCATA CATAT GTCTG GCAGG TCCTG AAAGA GAATG GTCCA ATGGC |
| 501 | CTCTG ACCCA CTGTG CCTTA CCTAC TCATA TCTTT CTCAT GTGGA CCTGG |
| 551 | TAAAA GACTT GAATT CAGGC CTCAT TGGAG CCCTA CTAGT ATGTA GAGAA |
| 601 | GGGAG TCTGG CCAAG GAAAA GACAC AGACC TTGCA CAAAT TTATA CTACT |
| 651 | TTTTG CTGTA TTTGA TGAAG GGAAA AGTTG GCACT CAGAA ACAAA GAACT |
| 701 | CCTTG ATGCA GGATA GGGAT GCTGC ATCTG CTCGG GCCTG GCCTA AAATG |
| 751 | CACAC AGTCA ATGGT TATGT AAACA GGTCT CTGCC AGGTC TGATT GGATG |
| 801 | CCACA GGAAA TCAGT CTATT GGCAT GTGAT TGGAA TGGGC ACCAC TCCTG |
| 851 | AAGTG CACTC AATAT TCCTC GAAGG TCACA CATTT CTTGT GAGGA ACCAT |
| 901 | CGCCA GGCTA GCTTG GAAAT CTCGC CAATA ACTTT CCTTA CTGCT CAAAC |
| 951 | ACTCT TGATG GACCT TGGAC AGTTT CTACT GTTTT GTCAT ATCTC TTCCC |
| 1001 | ACCAA CATGA TGGCA TGGAA GCTTA TGTCA AAGTA GACAG CTGTC CAGAG |
| 1051 | GAACC CCAAC TACGA ATGAA AAATA ATGAA GAAGC GGAAG ACTAT GATGA |
| 1101 | TGATC TTACT GATTC TGAAA TGGAT GTGGT CAGGT TTGAT GATGA CAACT |
| 1151 | CTCCT TCCTT TATCC AAATT CGCTC AGTTG CCAAG AAGCA TCCTA AAACT |
| 1201 | TGGGT ACATT ACATT GCTGC TGAAG AGGAG GACTG GGACT ATGCT CCCTT |
| 1251 | AGTCC TCGCC CCCGA TGACA GAAGT TATAA AAGTC AATAT TTGAA CAATG |
| 1301 | GCCCT CAGCG GATTG GTAGG AAGTA CAAAA AAGTC CGATT TATGG CATAC |
| 1351 | ACAGA TGAAA CCTTT AAGAC TCGTG AAGCT ATTCA GCATG AATCA GGAAT |
| 1401 | CTTGG GACCT TTACT TTATG GGGAA GTTGG AGACA CACTG TTGAT TATAT |
| 1451 | TTAAG AATCA AGCAA GCAGA CCATA TAACA TCTAC CCTCA CGGAA TCACT |
| 1501 | GATGT CCGTC CTTTG TATTC AAGGA GATTA CCAAA AGGTG TAAAA CATTT |
| 1551 | GAAGG ATTTT CCAAT TCTGC CAGGA GAAAT ATTCA AATAT AAATG GACAG |
| 1601 | TGACT GTAGA AGATG GGCCA ACTAA ATCAG ATCCT CGGTG CCTGA CCCGC |
| 1651 | TATTA CTCTA GTTTC GTTAA TATGG AGAGA GATCT AGCTT CAGGA CTCAT |
| 1701 | TGGCC CTCTC CTCAT CTGCT ACAAA GAATC TGTAG ATCAA AGAGG AAACC |
| 1751 | AGATA ATGTC AGACA AGAGG AATGT CATCC TGTTT TCTGT ATTTG ATGAG |
| 1801 | AACCG AAGCT GGTAC CTCAC AGAGA ATATA CAACG CTTTC TCCCC AATCC |
| 1851 | AGCTG GAGTG CAGCT TGAGG ATCCA GAGTT CCAAG CCTCC AACAT CATGC |
| 1901 | ACAGC ATCAA TGGCT ATGTT TTTGA TAGTT TGCAG TTGTC AGTTT GTTTG |
| 1951 | CATGA GGTGG CATAC TGGTA CATTC TAAGC ATTGG AGCAC AGACT GACTT |
| 2001 | CCTTT CTGTC TTCTT CTCTG GATAT ACCTT CAAAC ACAAA ATGGT CTATG |
| 2051 | AAGAC ACACT CACCC TATTC CCATT CTCAG GAGAA ACTGT CTTCA TGTCG |
| 2101 | ATGGA AAACC CAGGT CTATG GATTC TGGGG TGCCA CAACT CAGAC TTTCG |
| 2151 | GAACA GAGGC ATGAC CGCCT TACTG AAGGT TTCTA GTTGT GACAA GAACA |
| 2201 | CTGGT GATTA TTACG AGGAC AGTTA TGAAG ATATT TCAGC ATACT TGCTG |
| 2251 | AGTAA AAACA ATGCC ATTGA ACCAA GAAGC TTCTC TCAAA ACGGC GCGCC |
| 2301 | AGGTA CCTCA GAGTC TGCTA CCCCC GAGTC AGGGC CAGGA TCAGA GCCAG |
| 2351 | CCACC TCCGG GTCTG AGACA CCCGG GACTT CCGAG AGTGC CACCC CTGAG |
| 2401 | TCCGG ACCCG GGTCC GAGCC CGCCA CTTCC GGCTC CGAAA CTCCC GGCAC |
| 2451 | AAGCG AGAGC GCTAC CCCAG AGTCA GGACC AGGAA CATCT ACAGA GCCCT |
| 2501 | CTGAA GGCTC CGCTC CAGGG TCCCC AGCCG GCAGT CCCAC TAGCA CCGAG |
| 2551 | GAGGG AACCT CTGAA AGCGC CACAC CCGAA TCAGG GCCAG GGTCT GAGCC |
| 2601 | TGCTA CCAGC GGCAG CGAGA CACCA GGCAC CTCTG AGTCC GCCAC ACCAG |
| 2651 | AGTCC GGACC CGGAT CTCCC GCTGG GAGCC CCACC TCCAC TGAGG AGGGA |
| 2701 | TCTCC TGCTG GCTCT CCAAC ATCTA CTGAG GAAGG TACCT CAACC GAGCC |
| 2751 | ATCCG AGGGA TCAGC TCCCG GCACC TCAGA GTCGG CAACC CCGGA GTCTG |
| 2801 | GACCC GGAAC TTCCG AAAGT GCCAC ACCAG AGTCC GGTCC CGGGA CTTCA |
| 2851 | GAATC AGCAA CACCC GAGTC CGGCC CTGGG TCTGA ACCCG CCACA AGTGG |
| 2901 | TAGTG AGACA CCAGG ATCAG AACCT GCTAC CTCAG GGTCA GAGAC ACCCG |
| 2951 | GATCT CCGGC AGGCT CACCA ACCTC CACTG AGGAG GGCAC CAGCA CAGAA |
| 3001 | CCAAG CGAGG GCTCC GCACC CGGAA CAAGC ACTGA ACCCA GTGAG GGTTC |
| 3051 | AGCAC CCGGC TCTGA GCCGG CCACA AGTGG CAGTG AGACA CCCGG CACTT |
| 3101 | CAGAG AGTGC CACCC CCGAG AGTGG CCCAG GCACT AGTAC CGAGC CCTCT |
| 3151 | GAAGG CAGTG CGCCA GCCTC GAGCC CACCA GTCTT GAAAC GCCAT CAAGC |
| 3201 | TGAAA TAACT CGTAC TACTC TTCAG TCAGA TCAAG AGGAA ATCGA TTATG |
| 3251 | ATGAT ACCAT ATCAG TTGAA ATGAA GAAGG AAGAT TTTGA CATTT ATGAT |
| 3301 | GAGGA TGAAA ATCAG AGCCC CCGCA GCTTT CAAAA GAAAA CACGA CACTA |
| 3351 | TTTTA TTGCT GCAGT GGAGA GGCTC TGGGA TTATG GGATG AGTAG CTCCC |
| 3401 | CACAT GTTCT AAGAA ACAGG GCTCA GAGTG GCAGT GTCCC TCAGT TCAAG |
| 3451 | AAAGT TGTTT TCCAG GAATT TACTG ATGGC TCCTT TACTC AGCCC TTATA |
| 3501 | CCGTG GAGAA CTAAA TGAAC ATTTG GGACT CCTGG GGCCA TATAT AAGAG |
| 3551 | CAGAA GTTGA AGATA ATATC ATGGT AACTT TCAGA AATCA GGCCT CTCGT |
| 3601 | CCCTA TTCCT TCTAT TCTAG CCTTA TTTCT TATGA GGAAG ATCAG AGGCA |
| 3651 | AGGAG CAGAA CCTAG AAAAA ACTTT GTCAA GCCTA ATGAA ACCAA AACTT |
| 3701 | ACTTT TGGAA AGTGC AACAT CATAT GGCAC CCACT AAAGA TGAGT TTGAC |
| 3751 | TGCAA AGCCT GGGCT TATTT CTCTG ATGTT GACCT GGAAA AAGAT GTGCA |
| 3801 | CTCAG GCCTG ATTGG ACCCC TTCTG GTCTG CCACA CTAAC ACACT GAACC |
| 3851 | CTGCT CATGG GAGAC AAGTG ACAGT ACAGG AATTT GCTCT GTTTT TCACC |
| 3901 | ATCTT TGATG AGACC AAAAG CTGGT ACTTC ACTGA AAATA TGGAA AGAAA |
| 3951 | CTGCA GGGCT CCCTG CAATA TCCAG ATGGA AGATC CCACT TTTAA AGAGA |
| 4001 | ATTAT CGCTT CCATG CAATC AATGG CTACA TAATG GATAC ACTAC CTGGC |
| 4051 | TTAGT AATGG CTCAG GATCA AAGGA TTCGA TGGTA TCTGC TCAGC ATGGG |
| 4101 | CAGCA ATGAA AACAT CCATT CTATT CATTT CAGTG GACAT GTGTT CACTG |
| 4151 | TACGA AAAAA AGAGG AGTAT AAAAT GGCAC TGTAC AATCT CTATC CAGGT |
| 4201 | GTTTT TGAGA CAGTG GAAAT GTTAC CATCC AAAGC TGGAA TTTGG CGGGT |
| 4251 | GGAAT GCCTT ATTGG CGAGC ATCTA CATGC TGGGA TGAGC ACACT TTTTC |
| 4301 | TGGTG TACAG CAATA AGTGT CAGAC TCCCC TGGGA ATGGC TTCTG GACAC |
| 4351 | ATTAG AGATT TTCAG ATTAC AGCTT CAGGA CAATA TGGAC AGTGG GCCCC |
| 4401 | AAAGC TGGCC AGACT TCATT ATTCC GGATC AATCA ATGCC TGGAG CACCA |
| 4451 | AGGAG CCCTT TTCTT GGATC AAGGT GGATC TGTTG GCACC AATGA TTATT |
| 4501 | CACGG CATCA AGACC CAGGG TGCCC GTCAG AAGTT CTCCA GCCTC TACAT |
| 4551 | CTCTC AGTTT ATCAT CATGT ATAGT CTTGA TGGGA AGAAG TGGCA GACTT |
| 4601 | ATCGA GGAAA TTCCA CTGGA ACCTT AATGG TCTTC TTTGG CAATG TGGAT |
| 4651 | TCATC TGGGA TAAAA CACAA TATTT TTAAC CCTCC AATTA TTGCT CGATA |
| 4701 | CATCC GTTTG CACCC AACTC ATTAT AGCAT TCGCA GCACT CTTCG CATGG |
| 4751 | AGTTG ATGGG CTGTG ATTTA AATAG TTGCA GCATG CCATT GGGAA TGGAG |
| 4801 | AGTAA AGCAA TATCA GATGC ACAGA TTACT GCTTC ATCCT ACTTT ACCAA |
| 4851 | TATGT TTGCC ACCTG GTCTC CTTCA AAAGC TCGAC TTCAC CTCCA AGGGA |
| 4901 | GGAGT AATGC CTGGA GACCT CAGGT GAATA ATCCA AAAGA GTGGC TGCAA |
| 4951 | GTGGA CTTCC AGAAG ACAAT GAAAG TCACA GGAGT AACTA CTCAG GGAGT |
| 5001 | AAAAT CTCTG CTTAC CAGCA TGTAT GTGAA GGAGT TCCTC ATCTC CAGCA |
| 5051 | GTCAA GATGG CCATC AGTGG ACTCT CTTTT TTCAG AATGG CAAAG TAAAG |
| 5101 | GTTTT TCAGG GAAAT CAAGA CTCCT TCACA CCTGT GGTGA ACTCT CTAGA |
| 5151 | CCCAC CGTTA CTGAC TCGCT ACCTT CGAAT TCACC CCCAG AGTTG GGTGC |
| 5201 | ACCAG ATTGC CCTGA GGATG GAGGT TCTGG GCTGC GAGGC ACAGG ACCTC |
| 5251 | TACGA CAAAA CTCAC ACATG CCCAC CGTGC CCAGC TCCAG AACTC CTGGG |
| 5301 | CGGAC CGTCA GTCTT CCTCT TCCCC CCAAA ACCCA AGGAC ACCCT CATGG |
| 5351 | CCTCC CGGAC CCCTG AGGTC ACATG CGTGG TGGTG GACGT GAGCC ACGAA |
| 5401 | GACCC TGAGG TCAAG TTCAA CTGGT ACGTG GACGG CGTGG AGGTG CATAA |
| 5451 | TGCCA AGACA AAGCC GCGGG AGGAG CAGTA CAACA GCACG TACCG TGTGG |
| 5501 | TCAGC GTCCT CACCG TCCTG GCCCA GGACT GGCTG AATGG CAAGG AGTAC |
| 5551 | AAGTG CAAGG TCTCC AACAA AGCCC TCCCA GCCCC CATCG AGAAA ACCAT |
| 5601 | CTCCA AAGCC AAAGG GCAGC CCCGA GAACC ACAGG TGTAC ACCCT GCCCC |
| 5651 | CATCC CGGGA TGAGC TGACC AAGAA CCAGG TCAGC CTGAC CTGCC TGGTC |
| 5701 | AAAGG CTTCT ATCCC AGCGA CATCG CCGTG GAGTG GGAGA GCAAT GGGCA |
| 5751 | GCCGG AGAAC AACTA CAAGA CCACG CCTCC CGTGT TGGAC TCCGA CGGCT |
| 5801 | CCTTC TTCCT CTACA GCAAG CTCAC CGTGG ACAAG AGCAG GTGGC AGCAG |
| 5851 | GGGAA CGTCT TCTCA TGCTC CGTGA TGCAT GAGGC TCTGC ACAAC GCCTA |
| 5901 | CACGC AGAAG AGCCT CTCCC TGTCT CCGGG TAAAT GA |

FVIII 283 Protein Sequence (FVIII 169 with IHH Triple Mutation) (SEQ ID NO: 161)

| | |
|---|---|
| 1 | MQIELSTCFF LCLLRFCFSA TRRYYLGAVE LSWDYMQSDL GELPVDARFP |
| 51 | PRVPKSFPFN TSVVYKKTLF VEFTDHLFNI AKPRPPWMGL LGPTIQAEVY |
| 101 | DTVVITLKNM ASHPVSLHAV GVSYWKASEG AEYDDQTSQR EKEDDKVFPG |
| 151 | GSHTYVWQVL KENGPMASDP LCLTYSYLSH VDLVKDLNSG LIGALLVCRE |
| 201 | GSLAKEKTQT LHKFILLFAV FDEGKSWHSE TKNSLMQDRD AASARAWPKM |
| 251 | HTVNGYVNRS LPGLIGCHRK SVYWHVIGMG TTPEVHSIFL EGHTFLVRNH |
| 301 | RQASLEISPI TFLTAQTLLM DLGQFLLFCH ISSHQHDGME AYVKVDSCPE |
| 351 | EPQLRMKNNE EAEDYDDDLT DSEMDVVRFD DDNSPSFIQI RSVAKKHPKT |
| 401 | WVHYIAAEEE DWDYAPLVLA PDDRSYKSQY LNNGPQRIGR KYKKVRFMAY |
| 451 | TDETFKTREA IQHESGILGP LLYGEVGDTL LIIFKNQASR PYNIYPHGIT |
| 501 | DVRPLYSRRL PKGVKHLKDF PILPGEIFKY KWTVTVEDGP TKSDPRCLTR |
| 551 | YYSSFVNMER DLASGLIGPL LICYKESVDQ RGNQIMSDKR NVILFSVFDE |
| 601 | NRSWYLTENI QRFLPNPAGV QLEDPEFQAS NIMHSINGYV FDSLQLSVCL |
| 651 | HEVAYWYILS IGAQTDFLSV FFSGYTFKHK MVYEDTLTLF PFSGETVFMS |
| 701 | MENPGLWILG CHNSDFRNRG MTALLKVSSC DKNTGDYYED SYEDISAYLL |
| 751 | SKNNAIEPRS FSQNGAPGTS ESATPESGPG SEPATSGSET PGTSESATPE |
| 801 | SGPGSEPATS GSETPGTSES ATPESGPGTS TEPSEGSAPG SPAGSPTSTE |
| 851 | EGTSESATPE SGPGSEPATS GSETPGTSES ATPESGPGSP AGSPTSTEEG |
| 901 | SPAGSPTSTE EGTSTEPSEG SAPGTSESAT PESGPGTSES ATPESGPGTS |
| 951 | ESATPESGPG SEPATSGSET PGSEPATSGS ETPGSPAGSP TSTEEGTSTE |
| 1001 | PSEGSAPGTS TEPSEGSAPG SEPATSGSET PGTSESATPE SGPGTSTEPS |
| 1051 | EGSAPASSPP VLKRHQAEIT RTTLQSDQEE IDYDDTISVE MKKEDFDIYD |
| 1101 | EDENQSPRSF QKKTRHYFIA AVERLWDYGM SSSPHVLRNR AQSGSVPQFK |
| 1151 | KVVFQEFTDG SFTQPLYRGE LNEHLGLLGP YIRAEVEDNI MVTFRNQASR |
| 1201 | PYSFYSSLIS YEEDQRQGAE PRKNFVKPNE TKTYFWKVQH HMAPTKDEFD |
| 1251 | CKAWAYFSDV DLEKDVHSGL IGPLLVCHTN TLNPAHGRQV TVQEFALFFT |
| 1301 | IFDETKSWYF TENMERNCRA PCNIQMEDPT FKENYRFHAI NGYIMDTLPG |
| 1351 | LVMAQDQRIR WYLLSMGSNE NIHSIHFSGH VFTVRKKEEY KMALYNLYPG |
| 1401 | VFETVEMLPS KAGIWRVECL IGEHLHAGMS TLFLVYSNKC QTPLGMASGH |
| 1451 | IRDFQITASG QYGQWAPKLA RLHYSGSINA WSTKEPFSWI KVDLLAPMII |
| 1501 | HGIKTQGARQ KFSSLYISQF IIMYSLDGKK WQTYRGNSTG TLMVFFGNVD |
| 1551 | SSGIKHNIFN PPIIARYIRL HPTHYSIRST LRMELMGCDL NSCSMPLGME |
| 1601 | SKAISDAQIT ASSYFTNMFA TWSPSKARLH LQGRSNAWRP QVNNPKEWLQ |
| 1651 | VDFQKTMKVT GVTTQGVKSL LTSMYVKEFL ISSSQDGHQW TLFFQNGKVK |
| 1701 | VFQGNQDSFT PVVNSLDPPL LTRYLRIHPQ SWVHQIALRM EVLGCEAQDL |
| 1751 | YDKTHTCPPC PAPELLGGPS VFLFPPKPKD TLMASRTPEV TCVVVDVSHE |
| 1801 | DPEVKFNWYV DGVEVHNAKT KPREEQYNST YRVVSVLTVL AQDWLNGKEY |
| 1851 | KCKVSNKALP APIEKTISKA KGQPREPQVY TLPPSRDELT KNQVSLTCLV |
| 1901 | KGFYPSDIAV EWESNGQPEN NYKTTPPVLD SDGSFFLYSK LTVDKSRWQQ |
| 1951 | GNVFSCSVMH EALHNAYTQK SLSLSPGK* |

pSYNFVIII 010 Nucleotide Sequence-(Dual Chain FVIIIFc) (SEQ ID NO: 162)

| | |
|---|---|
| 1 | ATGCAAATAG AGCTCTCCAC CTGCTTCTTT CTGTGCCTTT TGCGATTCTG |
| 51 | CTTTAGTGCC ACCAGAAGAT ACTACCTGGG TGCAGTGGAA CTGTCATGGG |
| 101 | ACTATATGCA AAGTGATCTC GGTGAGCTGC CTGTGGACGC AAGATTTCCT |
| 151 | CCTAGAGTGC CAAAATCTTT TCCATTCAAC ACCTCAGTCG TGTACAAAAA |
| 201 | GACTCTGTTT GTAGAATTCA CGGATCACCT TTTCAACATC GCTAAGCCAA |
| 251 | GGCCACCCTG GATGGGTCTG CTAGGTCCTA CCATCCAGGC TGAGGTTTAT |
| 301 | GATACAGTGG TCATTACACT TAAGAACATG GCTTCCCATC CTGTCAGTCT |
| 351 | TCATGCTGTT GGTGTATCCT ACTGGAAAGC TTCTGAGGGA GCTGAATATG |
| 401 | ATGATCAGAC CAGTCAAAGG GAGAAAGAAG ATGATAAAGT CTTCCCTGGT |
| 451 | GGAAGCCATA CATATGTCTG GCAGGTCCTG AAAGAGAATG GTCCAATGGC |
| 501 | CTCTGACCCA CTGTGCCTTA CCTACTCATA TCTTTCTCAT GTGGACCTGG |
| 551 | TAAAAGACTT GAATTCAGGC CTCATTGGAG CCCTACTAGT ATGTAGAGAA |
| 601 | GGGAGTCTGG CCAAGGAAAA GACACAGACC TTGCACAAAT TTATACTACT |
| 651 | TTTTGCTGTA TTTGATGAAG GGAAAAGTTG GCACTCAGAA ACAAAGAACT |
| 701 | CCTTGATGCA GGATAGGGAT GCTGCATCTG CTCGGGCCTG GCCTAAAATG |
| 751 | CACACAGTCA ATGGTTATGT AAACAGGTCT CTGCCAGGTC TGATTGGATG |
| 801 | CCACAGGAAA TCAGTCTATT GGCATGTGAT TGGAATGGGC ACCACTCCTG |
| 851 | AAGTGCACTC AATATTCCTC GAAGGTCACA CATTTCTTGT GAGGAACCAT |
| 901 | CGCCAGGCGT CCTTGGAAAT CTCGCCAATA ACTTTCCTTA CTGCTCAAAC |
| 951 | ACTCTTGATG GACCTTGGAC AGTTTCTACT GTTTTGTCAT ATCTCTTCCC |
| 1001 | ACCAACATGA TGGCATGGAA GCTTATGTCA AAGTAGACAG CTGTCCAGAG |
| 1051 | GAACCCCAAC TACGAATGAA AAATAATGAA GAAGCGGAAG ACTATGATGA |
| 1101 | TGATCTTACT GATTCTGAAA TGGATGTGGT CAGGTTTGAT GATGACAACT |
| 1151 | CTCCTTCCTT TATCCAAATT CGCTCAGTTG CCAAGAAGCA TCCTAAAACT |
| 1201 | TGGGTACATT ACATTGCTGC TGAAGAGGAG GACTGGGACT ATGCTCCCTT |
| 1251 | AGTCCTCGCC CCCGATGACA GAAGTTATAA AAGTCAATAT TTGAACAATG |
| 1301 | GCCCTCAGCG GATTGGTAGG AAGTACAAAA AAGTCCGATT TATGGCATAC |
| 1351 | ACAGATGAAA CCTTTAAGAC TCGTGAAGCT ATTCAGCATG AATCAGGAAT |
| 1401 | CTTGGGACCT TTACTTTATG GGGAAGTTGG AGACACACTG TTGATTATAT |
| 1451 | TTAAGAATCA AGCAAGCAGA CCATATAACA TCTACCCTCA CGGAATCACT |
| 1501 | GATGTCCGTC CTTTGTATTC AAGGAGATTA CCAAAAGGTG TAAAACATTT |
| 1551 | GAAGGATTTT CCAATTCTGC CAGGAGAAAT ATTCAAATAT AAATGGACAG |
| 1601 | TGACTGTAGA AGATGGGCCA ACTAAATCAG ATCCTCGGTG CCTGACCCGC |
| 1651 | TATTACTCTA GTTTCGTTAA TATGGAGAGA GATCTAGCTT CAGGACTCAT |
| 1701 | TGGCCCTCTC CTCATCTGCT ACAAAGAATC TGTAGATCAA AGAGGAAACC |
| 1751 | AGATAATGTC AGACAAGAGG AATGTCATCC TGTTTTCTGT ATTTGATGAG |
| 1801 | AACCGAAGCT GGTACCTCAC AGAGAATATA CAACGCTTTC TCCCCAATCC |
| 1851 | AGCTGGAGTG CAGCTTGAGG ATCCAGAGTT CCAAGCCTCC AACATCATGC |
| 1901 | ACAGCATCAA TGGCTATGTT TTTGATAGTT TGCAGTTGTC AGTTTGTTTG |
| 1951 | CATGAGGTGG CATACTGGTA CATTCTAAGC ATTGGAGCAC AGACTGACTT |
| 2001 | CCTTTCTGTC TTCTTCTCTG GATATACCTT CAAACACAAA ATGGTCTATG |
| 2051 | AAGACACACT CACCCTATTC CCATTCTCAG GAGAAACTGT CTTCATGTCG |
| 2101 | ATGGAAAACC CAGGTCTATG GATTCTGGGG TGCCACAACT CAGACTTTCG |
| 2151 | GAACAGAGGC ATGACCGCCT TACTGAAGGT TTCTAGTTGT GACAAGAACA |
| 2201 | CTGGTGATTA TTACGAGGAC AGTTATGAAG ATATTTCAGC ATACTTGCTG |
| 2251 | AGTAAAAACA ATGCCATTGA ACCAAGAAGC TTCTCTCAAA ACCCACCAGT |
| 2301 | CTTGAAACGC CATCAACGGG AAATAACTCG TACTACTCTT CAGTCAGATC |
| 2351 | AAGAGGAAAT TGACTATGAT GATACCATAT CAGTTGAAAT GAAGAAGGAA |
| 2401 | GATTTTGACA TTTATGATGA GGATGAAAAT CAGAGCCCCC GCAGCTTTCA |
| 2451 | AAAGAAAACA CGACACTATT TTATTGCTGC AGTGGAGAGG CTCTGGGATT |
| 2501 | ATGGGATGAG TAGCTCCCCA CATGTTCTAA GAAACAGGGC TCAGAGTGGC |
| 2551 | AGTGTCCCTC AGTTCAAGAA AGTTGTTTTC CAGGAATTTA CTGATGGCTC |
| 2601 | CTTTACTCAG CCCTTATACC GTGGAGAACT AAATGAACAT TTGGGACTCC |
| 2651 | TGGGGCCATA TATAAGAGCA GAAGTTGAAG ATAATATCAT GGTAACTTTC |
| 2701 | AGAAATCAGG CCTCTCGTCC CTATTCCTTC TATTCTAGCC TTATTTCTTA |
| 2751 | TGAGGAAGAT CAGAGGCAAG GAGCAGAACC TAGAAAAAAC TTTGTCAAGC |
| 2801 | CTAATGAAAC CAAAACTTAC TTTTGGAAAG TGCAACATCA TATGGCACCC |
| 2851 | ACTAAAGATG AGTTTGACTG CAAAGCCTGG GCTTATTTCT CTGATGTTGA |
| 2901 | CCTGGAAAAA GATGTGCACT CAGGCCTGAT TGGACCCCTT CTGGTCTGCC |
| 2951 | ACACTAACAC ACTGAACCCT GCTCATGGGA GACAAGTGAC AGTACAGGAA |
| 3001 | TTTGCTCTGT TTTTCACCAT CTTTGATGAG ACCAAAAGCT GGTACTTCAC |
| 3051 | TGAAAATATG GAAAGAAACT GCAGGGCTCC CTGCAATATC CAGATGGAAG |
| 3101 | ATCCCACTTT TAAAGAGAAT TATCGCTTCC ATGCAATCAA TGGCTACATA |
| 3151 | ATGGATACAC TACCTGGCTT AGTAATGGCT CAGGATCAAA GGATTCGATG |
| 3201 | GTATCTGCTC AGCATGGGCA GCAATGAAAA CATCCATTCT ATTCATTTCA |
| 3251 | GTGGACATGT GTTCACTGTA CGAAAAAAAG AGGAGTATAA AATGGCACTG |
| 3301 | TACAATCTCT ATCCAGGTGT TTTTGAGACA GTGGAAATGT TACCATCCAA |
| 3351 | AGCTGGAATT TGGCGGGTGG AATGCCTTAT TGGCGAGCAT CTACATGCTG |
| 3401 | GGATGAGCAC ACTTTTTCTG GTGTACAGCA ATAAGTGTCA GACTCCCCTG |
| 3451 | GGAATGGCTT CTGGACACAT TAGAGATTTT CAGATTACAG CTTCAGGACA |
| 3501 | ATATGGACAG TGGGCCCCAA AGCTGGCCAG ACTTCATTAT TCCGGATCAA |
| 3551 | TCAATGCCTG GAGCACCAAG GAGCCCTTTT CTTGGATCAA GGTGGATCTG |
| 3601 | TTGGCACCAA TGATTATTCA CGGCATCAAG ACCCAGGGTG CCCGTCAGAA |
| 3651 | GTTCTCCAGC CTCTACATCT CTCAGTTTAT CATCATGTAT AGTCTTGATG |
| 3701 | GGAAGAAGTG GCAGACTTAT CGAGGAAATT CCACTGGAAC CTTAATGGTC |
| 3751 | TTCTTTGGCA ATGTGGATTC ATCTGGGATA AAACACAATA TTTTTAACCC |
| 3801 | TCCAATTATT GCTCGATACA TCCGTTTGCA CCCAACTCAT TATAGCATTC |
| 3851 | GCAGCACTCT TCGCATGGAG TTGATGGGCT GTGATTTAAA TAGTTGCAGC |
| 3901 | ATGCCATTGG GAATGGAGAG TAAAGCAATA TCAGATGCAC AGATTACTGC |
| 3951 | TTCATCCTAC TTTACCAATA TGTTTGCCAC CTGGTCTCCT TCAAAAGCTC |
| 4001 | GACTTCACCT CCAAGGGAGG AGTAATGCCT GGAGACCTCA GGTGAATAAT |
| 4051 | CCAAAAGAGT GGCTGCAAGT GGACTTCCAG AAGACAATGA AAGTCACAGG |
| 4101 | AGTAACTACT CAGGGAGTAA AATCTCTGCT TACCAGCATG TATGTGAAGG |
| 4151 | AGTTCCTCAT CTCCAGCAGT CAAGATGGCC ATCAGTGGAC TCTCTTTTTT |
| 4201 | CAGAATGGCA AAGTAAAGGT TTTTCAGGGA AATCAAGACT CCTTCACACC |
| 4251 | TGTGGTGAAC TCTCTAGACC CACCGTTACT GACTCGCTAC CTTCGAATTC |
| 4301 | ACCCCCAGAG TTGGGTGCAC CAGATTGCCC TGAGGATGGA GGTTCTGGGC |
| 4351 | TGCGAGGCAC AGGACCTCTA CGACAAAACT CACACATGCC CACCGTGCCC |
| 4401 | AGCTCCAGAA CTCCTGGGCG GACCGTCAGT CTTCCTCTTC CCCCCAAAAC |
| 4451 | CCAAGGACAC CCTCATGATC TCCCGGACCC CTGAGGTCAC ATGCGTGGTG |
| 4501 | GTGGACGTGA GCCACGAAGA CCCTGAGGTC AAGTTCAACT GGTACGTGGA |
| 4551 | CGGCGTGGAG GTGCATAATG CCAAGACAAA GCCGCGGGAG GAGCAGTACA |
| 4601 | ACAGCACGTA CCGTGTGGTC AGCGTCCTCA CCGTCCTGCA CCAGGACTGG |
| 4651 | CTGAATGGCA AGGAGTACAA GTGCAAGGTC TCCAACAAAG CCCTCCCAGC |
| 4701 | CCCCATCGAG AAAACCATCT CCAAAGCCAA AGGGCAGCCC CGAGAACCAC |
| 4751 | AGGTGTACAC CCTGCCCCCA TCCCGGGATG AGCTGACCAA GAACCAGGTC |
| 4801 | AGCCTGACCT GCCTGGTCAA AGGCTTCTAT CCCAGCGACA TCGCCGTGGA |
| 4851 | GTGGGAGAGC AATGGGCAGC CGGAGAACAA CTACAAGACC ACGCCTCCCG |
| 4901 | TGTTGGACTC CGACGGCTCC TTCTTCCTCT ACAGCAAGCT CACCGTGGAC |
| 4951 | AAGAGCAGGT GGCAGCAGGG GAACGTCTTC TCATGCTCCG TGATGCATGA |
| 5001 | GGCTCTGCAC AACCACTACA CGCAGAAGAG CCTCTCCCTG TCTCCGGGTA |
| 5051 | AATGA |

pSYNFVIII 010 Protein Sequence-(Dual Chain FVIIIFc) (SEQ ID NO: 163)

| | |
|---|---|
| 1 | MQIELSTCFF LCLLRFCFSA TRRYYLGAVE LSWDYMQSDL GELPVDARFP |
| 51 | PRVPKSFPFN TSVVYKKTLF VEFTDHLFNI AKPRPPWMGL LGPTIQAEVY |
| 101 | DTVVITLKNM ASHPVSLHAV GVSYWKASEG AEYDDQTSQR EKEDDKVFPG |
| 151 | GSHTYVWQVL KENGPMASDP LCLTYSYLSH VDLVKDLNSG LIGALLVCRE |
| 201 | GSLAKEKTQT LHKFILLFAV FDEGKSWHSE TKNSLMQDRD AASARAWPKM |
| 251 | HTVNGYVNRS LPGLIGCHRK SVYWHVIGMG TTPEVHSIFL EGHTFLVRNH |
| 301 | RQASLEISPI TFLTAQTLLM DLGQFLLFCH ISSHQHDGME AYVKVDSCPE |
| 351 | EPQLRMKNNE EAEDYDDDLT DSEMDVVRFD DDNSPSFIQI RSVAKKHPKT |
| 401 | WVHYIAAEEE DWDYAPLVLA PDDRSYKSQY LNNGPQRIGR KYKKVRFMAY |
| 451 | TDETFKTREA IQHESGILGP LLYGEVGDTL LIIFKNQASR PYNIYPHGIT |
| 501 | DVRPLYSRRL PKGVKHLKDF PILPGEIFKY KWTVTVEDGP TKSDPRCLTR |
| 551 | YYSSFVNMER DLASGLIGPL LICYKESVDQ RGNQIMSDKR NVILFSVFDE |
| 601 | NRSWYLTENI QRFLPNPAGV QLEDPEFQAS NIMHSINGYV FDSLQLSVCL |
| 651 | HEVAYWYILS IGAQTDFLSV FFSGYTFKHK MVYEDTLTLF PFSGETVFMS |
| 701 | MENPGLWILG CHNSDFRNRG MTALLKVSSC DKNTGDYYED SYEDISAYLL |
| 751 | SKNNAIEPRS FSQNPPVLKR HQREITRTTL QSDQEEIDYD DTISVEMKKE |
| 801 | DFDIYDEDEN QSPRSFQKKT RHYFIAAVER LWDYGMSSSP HVLRNRAQSG |
| 851 | SVPQFKKVVF QEFTDGSFTQ PLYRGELNEH LGLLGPYIRA EVEDNIMVTF |
| 901 | RNQASRPYSF YSSLISYEED QRQGAEPRKN FVKPNETKTY FWKVQHHMAP |
| 951 | TKDEFDCKAW AYFSDVDLEK DVHSGLIGPL LVCHTNTLNP AHGRQVTVQE |
| 1001 | FALFFTIFDE TKSWYFTENM ERNCRAPCNI QMEDPTFKEN YRFHAINGYI |
| 1051 | MDTLPGLVMA QDQRIRWYLL SMGSNENIHS IHFSGHVFTV RKKEEYKMAL |
| 1101 | YNLYPGVFET VEMLPSKAGI WRVECLIGEH LHAGMSTLFL VYSNKCQTPL |
| 1151 | GMASGHIRDF QITASGQYGQ WAPKLARLHY SGSINAWSTK EPFSWIKVDL |
| 1201 | LAPMIIHGIK TQGARQKFSS LYISQFIIMY SLDGKKWQTY RGNSTGTLMV |
| 1251 | FFGNVDSSGI KHNIFNPPII ARYIRLHPTH YSIRSTLRME LMGCDLNSCS |
| 1301 | MPLGMESKAI SDAQITASSY FTNMFATWSP SKARLHLQGR SNAWRPQVNN |
| 1351 | PKEWLQVDFQ KTMKVTGVTT QGVKSLLTSM YVKEFLISSS QDGHQWTLFF |
| 1401 | QNGKVKVFQG NQDSFTPVVN SLDPPLLTRY LRIHPQSWVH QIALRMEVLG |
| 1451 | CEAQDLYDKT HTCPPCPAPE LLGGPSVFLF PPKPKDTLMI SRTPEVTCVV |
| 1501 | VDVSHEDPEV KFNWYVDGVE VHNAKTKPRE EQYNSTYRVV SVLTVLHQDW |
| 1551 | LNGKEYKCKV SNKALPAPIE KTISKAKGQP REPQVYTLPP SRDELTKNQV |
| 1601 | SLTCLVKGFY PSDIAVEWES NGQPENNYKT TPPVLDSDGS FFLYSKLTVD |
| 1651 | KSRWQQGNVF SCSVMHEALH NHYTQKSLSL SPGK* |

FVIII 195 Protein Sequence (Dual Chain FVIIIFc with Two 144 AE XTENs at Amino Acid 1656 and 1900) (SEQ ID NO: 73)

| | |
|---|---|
| 1 | MQIELSTCFF LCLLRFCFSA TRRYYLGAVE LSWDYMQSDL GELPVDARFP |
| 51 | PRVPKSFPFN TSVVYKKTLF VEFTDHLFNI AKPRPPWMGL LGPTIQAEVY |
| 101 | DTVVITLKNM ASHPVSLHAV GVSYWKASEG AEYDDQTSQR EKEDDKVFPG |
| 151 | GSHTYVWQVL KENGPMASDP LCLTYSYLSH VDLVKDLNSG LIGALLVCRE |
| 201 | GSLAKEKTQT LHKFILLFAV FDEGKSWHSE TKNSLMQDRD AASARAWPKM |
| 251 | HTVNGYVNRS LPGLIGCHRK SVYWHVIGMG TTPEVHSIFL EGHTFLVRNH |
| 301 | RQASLEISPI TFLTAQTLLM DLGQFLLFCH ISSHQHDGME AYVKVDSCPE |
| 351 | EPQLRMKNNE EAEDYDDDLT DSEMDVVRFD DDNSPSFIQI RSVAKKHPKT |
| 401 | WVHYIAAEEE DWDYAPLVLA PDDRSYKSQY LNNGPQRIGR KYKKVRFMAY |
| 451 | TDETFKTREA IQHESGILGP LLYGEVGDTL LIIFKNQASR PYNIYPHGIT |
| 501 | DVRPLYSRRL PKGVKHLKDF PILPGEIFKY KWTVTVEDGP TKSDPRCLTR |
| 551 | YYSSFVNMER DLASGLIGPL LICYKESVDQ RGNQIMSDKR NVILFSVFDE |
| 601 | NRSWYLTENI QRFLPNPAGV QLEDPEFQAS NIMHSINGYV FDSLQLSVCL |
| 651 | HEVAYWYILS IGAQTDFLSV FFSGYTFKHK MVYEDTLTLF PFSGETVFMS |
| 701 | MENPGLWILG CHNSDFRNRG MTALLKVSSC DKNTGDYYED SYEDISAYLL |
| 751 | SKNNAIEPRS FSQNPPVLKR HQREITRTTL QGAPGTPGSG TASSSPGASP |
| 801 | GTSSTGSPGA SPGTSSTGSP GASPGTSSTG SPGSSPSAST GTGPGTPGSG |
| 851 | TASSSPGASP GTSSTGSPGA SPGTSSTGSP GASPGTSSTG SPGSSTPSGA |
| 901 | TGSPGSSTPS GATGSPGASP GTSSTGSPAS SSDQEEIDYD DTISVEMKKE |
| 951 | DFDIYDEDEN QSPRSFQKKT RHYFIAAVER LWDYGMSSSP HVLRNRAQSG |
| 1001 | SVPQFKKVVF QEFTDGSFTQ PLYRGELNEH LGLLGPYIRA EVEDNIMVTF |
| 1051 | RNQASRPYSF YSSLISYEED QRQGAEPRKN FVKPNETKTY FWKVQHHMAP |
| 1101 | TKDEFDCKAW AYFSDVDLEK DVHSGLIGPL LVCHTNTLNP AHGRQVTVQE |
| 1151 | FALFFTIFDE TKSWYFTENM ERNCRGAPTS ESATPESGPG SEPATSGSET |
| 1201 | PGTSESATPE SGPGSEPATS GSETPGTSES ATPESGPGTS TEPSEGSAPG |
| 1251 | TSESATPESG PGSPAGSPTS TEEGSPAGSP TSTEEGSPAG SPTSTEEGTS |
| 1301 | ESATPESGPG TSTEPSEGSA PGASSAPCNI QMEDPTFKEN YRFHAINGYI |
| 1351 | MDTLPGLVMA QDQRIRWYLL SMGSNENIHS IHFSGHVFTV RKKEEYKMAL |
| 1401 | YNLYPGVFET VEMLPSKAGI WRVECLIGEH LHAGMSTLFL VYSNKCQTPL |
| 1451 | GMASGHIRDF QITASGQYGQ WAPKLARLHY SGSINAWSTK EPFSWIKVDL |
| 1501 | LAPMIIHGIK TQGARQKFSS LYISQFIIMY SLDGKKWQTY RGNSTGTLMV |
| 1551 | FFGNVDSSGI KHNIFNPPII ARYIRLHPTH YSIRSTLRME LMGCDLNSCS |
| 1601 | MPLGMESKAI SDAQITASSY FTNMFATWSP SKARLHLQGR SNAWRPQVNN |
| 1651 | PKEWLQVDFQ KTMKVTGVTT QGVKSLLTSM YVKEFLISSS QDGHQWTLFF |
| 1701 | QNGKVKVFQG NQDSFTPVVN SLDPPLLTRY LRIHPQSWVH QIALRMEVLG |
| 1751 | CEAQDLYDKT HTCPPCPAPE LLGGPSVFLF PPKPKDTLMI SRTPEVTCVV |
| 1801 | VDVSHEDPEV KFNWYVDGVE VHNAKTKPRE EQYNSTYRVV SVLTVLHQDW |
| 1851 | LNGKEYKCKV SNKALPAPIE KTISKAKGQP REPQVYTLPP SRDELTKNQV |
| 1901 | SLTCLVKGFY PSDIAVEWES NGQPENNYKT TPPVLDSDGS FFLYSKLTVD |
| 1951 | KSRWQQGNVF SCSVMHEALH NHYTQKSLSL SPGK* |

pSYN-FVIII-173 Mature Protein Sequencing (SEQ ID NO: 72):

| | |
|---|---|
| 1 | ATRRYYLGAV ELSWDYMQSD LGELPVDARF PPRVPKSFPF NTSVVYKKTL |
| 51 | FVEFTDHLFN IAKPRPPWMG LLGPTIQAEV YDTVVITLKN MASHPVSLHA |
| 101 | VGVSYWKASE GAEYDDQTSQ REKEDDKVFP GGSHTYVWQV LKENGPMASD |
| 151 | PLCLTYSYLS HVDLVKDLNS GLIGALLVCR EGSLAKEKTQ TLHKFILLFA |
| 201 | VFDEGKSWHS ETKNSLMQDR DAASARAWPK MHTVNGYVNR SLPGLIGCHR |
| 251 | KSVYWHVIGM GTTPEVHSIF LEGHTFLVRN HRQASLEISP ITFLTAQTLL |
| 301 | MDLGQFLLFC HISSHQHDGM EAYVKVDSCP EEPQLRMKNN EEAEDYDDDL |
| 351 | TDSEMDVVRF DDDNSPSFIQ IRSVAKKHPK TWVHYIAAEE EDWDYAPLVL |
| 401 | APDDRSYKSQ YLNNGPQRIG RKYKKVRFMA YTDETFKTRE AIQHESGILG |
| 451 | PLLYGEVGDT LLIIFKNQAS RPYNIYPHGI TDVRPLYSRR LPKGVKHLKD |
| 501 | FPILPGEIFK YKWTVTVEDG PTKSDPRCLT RYYSSFVNME RDLASGLIGP |
| 551 | LLICYKESVD QRGNQIMSDK RNVILFSVFD ENRSWYLTEN IQRFLPNPAG |
| 601 | VQLEDPEFQA SNIMHSINGY VFDSLQLSVC LHEVAYWYIL SIGAQTDFLS |
| 651 | VFFSGYTFKH KMVYEDTLTL FPFSGETVFM SMENPGLWIL GCHNSDFRNR |
| 701 | GMTALLKVSS CDKNTGDYYE DSYEDISAYL LSKNNAIEPR SFSQNGAPGT |
| 751 | SESATPESGP GSEPATSGSE TPGTSESATP ESGPGSEPAT SGSETPGTSE |
| 801 | SATPESGPGT STEPSEGSAP GSPAGSPTST EEGTSESATP ESGPGSEPAT |
| 851 | SGSETPGTSE SATPESGPGS PAGSPTSTEE GSPAGSPTST EEGTSTEPSE |
| 901 | GSAPGTSESA TPESGPGTSE SATPESGPGT SESATPESGP GSEPATSGSE |
| 951 | TPGSEPATSG SETPGSPAGS PTSTEEGTST EPSEGSAPGT STEPSEGSAP |
| 1001 | GSEPATSGSE TPGTSESATP ESGPGTSTEP SEGSAPASSP PVLKRHQREI |
| 1051 | TRTTLQSDQE EIDYDDTISV EMKKEDFDIY DEDENQSPRS FQKKTRHYFI |
| 1101 | AAVERLWDYG MSSSPHVLRN RAQSGSVPQF KKVVFQEFTD GSFTQPLYRG |
| 1151 | ELNEHLGLLG PYIRAEVEDN IMVTFRNQAS RPYSFYSSLI SYEEDQRQGA |
| 1201 | EPRKNFVKPN ETKTYFWKVQ HHMAPTKDEF DCKAWAYFSD VDLEKDVHSG |
| 1251 | LIGPLLVCHT NTLNPAHGRQ VTVQEFALFF TIFDETKSWY FTENMERNCR |
| 1301 | APCNIQMEDP TFKENYRFHA INGYIMDTLP GLVMAQDQRI RWYLLSMGSN |
| 1351 | ENIHSIHFSG HVFTVRKKEE YKMALYNLYP GVFETVEMLP SKAGIWRVEC |
| 1401 | LIGEHLHAGM STLFLVYSNK CQTPLGMASG HIRDFQITAS GQYGQWAPKL |
| 1451 | ARLHYSGSIN AWSTKEPFSW IKVDLLAPMI IHGIKTQGAR QKFSSLYISQ |
| 1501 | FIIMYSLDGK KWQTYRGNST GTLMVFFGNV DSSGIKHNIF NPPIIARYIR |
| 1551 | LHPTHYSIRS TLRMELMGCD LNSCSMPLGM ESKAISDAQI TASSYFTNMF |
| 1601 | ATWSPSKARL HLQGRSNAWR PQVNNPKEWL QVDFQKTMKV TGVTTQGVKS |
| 1651 | LLTSMYVKEF LISSSQDGHQ WTLFFQNGKV KVFQGNQDSF TPVVNSLDPP |
| 1701 | LLTRYLRIHP QSWVHQIALR MEVLGCEAQD LYDKTHTCPP CPAPELLGGP |
| 1751 | SVFLFPPKPK DTLMISRTPE VTCVVVDVSH EDPEVKFNWY VDGVEVHNAK |
| 1801 | TKPREEQYNS TYRVVSVLTV LHQDWLNGKE YKCKVSNKAL PAPIEKTISK |
| 1851 | AKGQPREPQV YTLPPSRDEL TKNQVSLTCL VKGFYPSDIA VEWESNGQPE |
| 1901 | NNYKTTPPVL DSDGSFFLYS KLTVDKSRWQ QGNVFSCSVM HEALHNHYTQ |
| 1951 | KSLSLSPGK |

FVIII 196 Protein Sequence (Dual Chain FVIIIFc with Three 144 AE XTENs at Amino Acid 26, 1656 and 1900) (SEQ ID NO: 74)

| | |
|---|---|
| 1 | MQIELSTCFF LCLLRFCFSA TRRYYLGAVE LSWDYMQSDL GELPVGAPGS |
| 51 | SPSASTGTGP GSSPSASTGT GPGASPGTSS TGSPGASPGT SSTGSPGSST |
| 101 | PSGATGSPGS SPSASTGTGP GASPGTSSTG SPGSSPSAST GTGPGTPGSG |
| 151 | TASSSPGSST PSGATGSPGS STPSGATGSP GASPGTSSTG SPASSDARFP |
| 201 | PRVPKSFPFN TSVVYKKTLF VEFTDHLFNI AKPRPPWMGL LGPTIQAEVY |
| 251 | DTVVITLKNM ASHPVSLHAV GVSYWKASEG AEYDDQTSQR EKEDDKVFPG |
| 301 | GSHTYVWQVL KENGPMASDP LCLTYSYLSH VDLVKDLNSG LIGALLVCRE |
| 351 | GSLAKEKTQT LHKFILLFAV FDEGKSWHSE TKNSLMQDRD AASARAWPKM |
| 401 | HTVNGYVNRS LPGLIGCHRK SVYWHVIGMG TTPEVHSIFL EGHTFLVRNH |
| 451 | RQASLEISPI TFLTAQTLLM DLGQFLLFCH ISSHQHDGME AYVKVDSCPE |
| 501 | EPQLRMKNNE EAEDYDDDLT DSEMDVVRFD DDNSPSFIQI RSVAKKHPKT |
| 551 | WVHYIAAEEE DWDYAPLVLA PDDRSYKSQY LNNGPQRIGR KYKKVRFMAY |
| 601 | TDETFKTREA IQHESGILGP LLYGEVGDTL LIIFKNQASR PYNIYPHGIT |
| 651 | DVRPLYSRRL PKGVKHLKDF PILPGEIFKY KWTVTVEDGP TKSDPRCLTR |
| 701 | YYSSFVNMER DLASGLIGPL LICYKESVDQ RGNQIMSDKR NVILFSVFDE |
| 751 | NRSWYLTENI QRFLPNPAGV QLEDPEFQAS NIMHSINGYV FDSLQLSVCL |
| 801 | HEVAYWYILS IGAQTDFLSV FFSGYTFKHK MVYEDTLTLF PFSGETVFMS |
| 851 | MENPGLWILG CHNSDFRNRG MTALLKVSSC DKNTGDYYED SYEDISAYLL |
| 901 | SKNNAIEPRS FSQNPPVLKR HQREITRTTL QGAPGTPGSG TASSSPGASP |
| 951 | GTSSTGSPGA SPGTSSTGSP GASPGTSSTG SPGSSPSAST GTGPGTPGSG |
| 1001 | TASSSPGASP GTSSTGSPGA SPGTSSTGSP GASPGTSSTG SPGSSTPSGA |
| 1051 | TGSPGSSTPS GATGSPGASP GTSSTGSPAS SSDQEEIDYD DTISVEMKKE |
| 1101 | DFDIYDEDEN QSPRSFQKKT RHYFIAAVER LWDYGMSSSP HVLRNRAQSG |
| 1151 | SVPQFKKVVF QEFTDGSFTQ PLYRGELNEH LGLLGPYIRA EVEDNIMVTF |
| 1201 | RNQASRPYSF YSSLISYEED QRQGAEPRKN FVKPNETKTY FWKVQHHMAP |
| 1251 | TKDEFDCKAW AYFSDVDLEK DVHSGLIGPL LVCHTNTLNP AHGRQVTVQE |
| 1301 | FALFFTIFDE TKSWYFTENM ERNCRGAPTS ESATPESGPG SEPATSGSET |
| 1351 | PGTSESATPE SGPGSEPATS GSETPGTSES ATPESGPGTS TEPSEGSAPG |
| 1401 | TSESATPESG PGSPAGSPTS TEEGSPAGSP TSTEEGSPAG SPTSTEEGTS |
| 1451 | ESATPESGPG TSTEPSEGSA PGASSAPCNI QMEDPTFKEN YRFHAINGYI |
| 1501 | MDTLPGLVMA QDQRIRWYLL SMGSNENIHS IHFSGHVFTV RKKEEYKMAL |
| 1551 | YNLYPGVFET VEMLPSKAGI WRVECLIGEH LHAGMSTLFL VYSNKCQTPL |
| 1601 | GMASGHIRDF QITASGQYGQ WAPKLARLHY SGSINAWSTK EPFSWIKVDL |
| 1651 | LAPMIIHGIK TQGARQKFSS LYISQFIIMY SLDGKKWQTY RGNSTGTLMV |
| 1701 | FFGNVDSSGI KHNIFNPPII ARYIRLHPTH YSIRSTLRME LMGCDLNSCS |
| 1751 | MPLGMESKAI SDAQITASSY FTNMFATWSP SKARLHLQGR SNAWRPQVNN |
| 1801 | PKEWLQVDFQ KTMKVTGVTT QGVKSLLTSM YVKEFLISSS QDGHQWTLFF |
| 1851 | QNGKVKVFQG NQDSFTPVVN SLDPPLLTRY LRIHPQSWVH QIALRMEVLG |
| 1901 | CEAQDLYDKT HTCPPCPAPE LLGGPSVFLF PPKPKDTLMI SRTPEVTCVV |
| 1951 | VDVSHEDPEV KFNWYVDGVE VHNAKTKPRE EQYNSTYRVV SVLTVLHQDW |
| 2001 | LNGKEYKCKV SNKALPAPIE KTISKAKGQP REPQVYTLPP SRDELTKNQV |
| 2051 | SLTCLVKGFY PSDIAVEWES NGQPENNYKT TPPVLDSDGS FFLYSKLTVD |
| 2101 | KSRWQQGNVF SCSVMHEALH NHYTQKSLSL SPGK* |

FVIII 199 Protein Sequence (Single Chain FVIIIFc with Three 144 AE XTENs at amino acid 1656 and 1900) (SEQ ID NO: 75)

| | |
|---|---|
| 1 | MQIELSTCFF LCLLRFCFSA TRRYYLGAVE LSWDYMQSDL GELPVDARFP |
| 51 | PRVPKSFPFN TSVVYKKTLF VEFTDHLFNI AKPRPPWMGL LGPTIQAEVY |
| 101 | DTVVITLKNM ASHPVSLHAV GVSYWKASEG AEYDDQTSQR EKEDDKVFPG |
| 151 | GSHTYVWQVL KENGPMASDP LCLTYSYLSH VDLVKDLNSG LIGALLVCRE |
| 201 | GSLAKEKTQT LHKFILLFAV FDEGKSWHSE TKNSLMQDRD AASARAWPKM |
| 251 | HTVNGYVNRS LPGLIGCHRK SVYWHVIGMG TTPEVHSIFL EGHTFLVRNH |
| 301 | RQASLEISPI TFLTAQTLLM DLGQFLLFCH ISSHQHDGME AYVKVDSCPE |
| 351 | EPQLRMKNNE EAEDYDDDLT DSEMDVVRFD DDNSPSFIQI RSVAKKHPKT |
| 401 | WVHYIAAEEE DWDYAPLVLA PDDRSYKSQY LNNGPQRIGR KYKKVRFMAY |
| 451 | TDETFKTREA IQHESGILGP LLYGEVGDTL LIIFKNQASR PYNIYPHGIT |
| 501 | DVRPLYSRRL PKGVKHLKDF PILPGEIFKY KWTVTVEDGP TKSDPRCLTR |
| 551 | YYSSFVNMER DLASGLIGPL LICYKESVDQ RGNQIMSDKR NVILFSVFDE |
| 601 | NRSWYLTENI QRFLPNPAGV QLEDPEFQAS NIMHSINGYV FDSLQLSVCL |
| 651 | HEVAYWYILS IGAQTDFLSV FFSGYTFKHK MVYEDTLTLF PFSGETVFMS |
| 701 | MENPGLWILG CHNSDFRNRG MTALLKVSSC DKNTGDYYED SYEDISAYLL |
| 751 | SKNNAIEPRS FSQNPPVLKR HQAEITRTTL QGAPGTPGSG TASSSPGASP |
| 801 | GTSSTGSPGA SPGTSSTGSP GASPGTSSTG SPGSSPSAST GTGPGTPGSG |
| 851 | TASSSPGASP GTSSTGSPGA SPGTSSTGSP GASPGTSSTG SPGSSTPSGA |
| 901 | TGSPGSSTPS GATGSPGASP GTSSTGSPAS SSDQEEIDYD DTISVEMKKE |
| 951 | DFDIYDEDEN QSPRSFQKKT RHYFIAAVER LWDYGMSSSP HVLRNRAQSG |
| 1001 | SVPQFKKVVF QEFTDGSFTQ PLYRGELNEH LGLLGPYIRA EVEDNIMVTF |
| 1051 | RNQASRPYSF YSSLISYEED QRQGAEPRKN FVKPNETKTY FWKVQHHMAP |
| 1101 | TKDEFDCKAW AYFSDVDLEK DVHSGLIGPL LVCHTNTLNP AHGRQVTVQE |
| 1151 | FALFFTIFDE TKSWYFTENM ERNCRGAPTS ESATPESGPG SEPATSGSET |
| 1201 | PGTSESATPE SGPGSEPATS GSETPGTSES ATPESGPGTS TEPSEGSAPG |
| 1251 | TSESATPESG PGSPAGSPTS TEEGSPAGSP TSTEEGSPAG SPTSTEEGTS |
| 1301 | ESATPESGPG TSTEPSEGSA PGASSAPCNI QMEDPTFKEN YRFHAINGYI |
| 1351 | MDTLPGLVMA QDQRIRWYLL SMGSNENIHS IHFSGHVFTV RKKEEYKMAL |
| 1401 | YNLYPGVFET VEMLPSKAGI WRVECLIGEH LHAGMSTLFL VYSNKCQTPL |
| 1451 | GMASGHIRDF QITASGQYGQ WAPKLARLHY SGSINAWSTK EPFSWIKVDL |
| 1501 | LAPMIIHGIK TQGARQKFSS LYISQFIIMY SLDGKKWQTY RGNSTGTLMV |
| 1551 | FFGNVDSSGI KHNIFNPPII ARYIRLHPTH YSIRSTLRME LMGCDLNSCS |
| 1601 | MPLGMESKAI SDAQITASSY FTNMFATWSP SKARLHLQGR SNAWRPQVNN |
| 1651 | PKEWLQVDFQ KTMKVTGVTT QGVKSLLTSM YVKEFLISSS QDGHQWTLFF |
| 1701 | QNGKVKVFQG NQDSFTPVVN SLDPPLLTRY LRIHPQSWVH QIALRMEVLG |
| 1751 | CEAQDLYDKT HTCPPCPAPE LLGGPSVFLF PPKPKDTLMI SRTPEVTCVV |
| 1801 | VDVSHEDPEV KFNWYVDGVE VHNAKTKPRE EQYNSTYRVV SVLTVLHQDW |
| 1851 | LNGKEYKCKV SNKALPAPIE KTISKAKGQP REPQVYTLPP SRDELTKNQV |
| 1901 | SLTCLVKGFY PSDIAVEWES NGQPENNYKT TPPVLDSDGS FFLYSKLTVD |
| 1951 | KSRWQQGNVF SCSVMHEALH NHYTQKSLSL SPGK* |

FVIII 201 Protein Sequence (Single Chain FVIIIFc with Three 144 AE XTENs at amino acid 26, 1656 &1900) (SEQ ID NO: 76)

| | |
|---|---|
| 1 | MQIELSTCFF LCLLRFCFSA TRRYYLGAVE LSWDYMQSDL GELPVGAPGS |
| 51 | SPSASTGTGP GSSPSASTGT GPGASPGTSS TGSPGASPGT SSTGSPGSST |
| 101 | PSGATGSPGS SPSASTGTGP GASPGTSSTG SPGSSPSAST GTGPGTPGSG |
| 151 | TASSSPGSST PSGATGSPGS STPSGATGSP GASPGTSSTG SPASSDARFP |
| 201 | PRVPKSFPFN TSVVYKKTLF VEFTDHLFNI AKPRPPWMGL LGPTIQAEVY |
| 251 | DTVVITLKNM ASHPVSLHAV GVSYWKASEG AEYDDQTSQR EKEDDKVFPG |
| 301 | GSHTYVWQVL KENGPMASDP LCLTYSYLSH VDLVKDLNSG LIGALLVCRE |
| 351 | GSLAKEKTQT LHKFILLFAV FDEGKSWHSE TKNSLMQDRD AASARAWPKM |
| 401 | HTVNGYVNRS LPGLIGCHRK SVYWHVIGMG TTPEVHSIFL EGHTFLVRNH |
| 451 | RQASLEISPI TFLTAQTLLM DLGQFLLFCH ISSHQHDGME AYVKVDSCPE |
| 501 | EPQLRMKNNE EAEDYDDDLT DSEMDVVRFD DDNSPSFIQI RSVAKKHPKT |
| 551 | WVHYIAAEEE DWDYAPLVLA PDDRSYKSQY LNNGPQRIGR KYKKVRFMAY |
| 601 | TDETFKTREA IQHESGILGP LLYGEVGDTL LIIFKNQASR PYNIYPHGIT |
| 651 | DVRPLYSRRL PKGVKHLKDF PILPGEIFKY KWTVTVEDGP TKSDPRCLTR |
| 701 | YYSSFVNMER DLASGLIGPL LICYKESVDQ RGNQIMSDKR NVILFSVFDE |
| 751 | NRSWYLTENI QRFLPNPAGV QLEDPEFQAS NIMHSINGYV FDSLQLSVCL |
| 801 | HEVAYWYILS IGAQTDFLSV FFSGYTFKHK MVYEDTLTLF PFSGETVFMS |
| 851 | MENPGLWILG CHNSDFRNRG MTALLKVSSC DKNTGDYYED SYEDISAYLL |
| 901 | SKNNAIEPRS FSQNPPVLKR HQAEITRTTL QGAPGTPGSG TASSSPGASP |
| 951 | GTSSTGSPGA SPGTSSTGSP GASPGTSSTG SPGSSPSAST GTGPGTPGSG |
| 1001 | TASSSPGASP GTSSTGSPGA SPGTSSTGSP GASPGTSSTG SPGSSTPSGA |
| 1051 | TGSPGSSTPS GATGSPGASP GTSSTGSPAS SSDQEEIDYD DTISVEMKKE |
| 1101 | DFDIYDEDEN QSPRSFQKKT RHYFIAAVER LWDYGMSSSP HVLRNRAQSG |
| 1151 | SVPQFKKVVF QEFTDGSFTQ PLYRGELNEH LGLLGPYIRA EVEDNIMVTF |
| 1201 | RNQASRPYSF YSSLISYEED QRQGAEPRKN FVKPNETKTY FWKVQHHMAP |
| 1251 | TKDEFDCKAW AYFSDVDLEK DVHSGLIGPL LVCHTNTLNP AHGRQVTVQE |
| 1301 | FALFFTIFDE TKSWYFTENM ERNCRGAPTS ESATPESGPG SEPATSGSET |
| 1351 | PGTSESATPE SGPGSEPATS GSETPGTSES ATPESGPGTS TEPSEGSAPG |
| 1401 | TSESATPESG PGSPAGSPTS TEEGSPAGSP TSTEEGSPAG SPTSTEEGTS |
| 1451 | ESATPESGPG TSTEPSEGSA PGASSAPCNI QMEDPTFKEN YRFHAINGYI |
| 1501 | MDTLPGLVMA QDQRIRWYLL SMGSNENIHS IHFSGHVFTV RKKEEYKMAL |
| 1551 | YNLYPGVFET VEMLPSKAGI WRVECLIGEH LHAGMSTLFL VYSNKCQTPL |
| 1601 | GMASGHIRDF QITASGQYGQ WAPKLARLHY SGSINAWSTK EPFSWIKVDL |
| 1651 | LAPMIIHGIK TQGARQKFSS LYISQFIIMY SLDGKKWQTY RGNSTGTLMV |
| 1701 | FFGNVDSSGI KHNIFNPPII ARYIRLHPTH YSIRSTLRME LMGCDLNSCS |
| 1751 | MPLGMESKAI SDAQITASSY FTNMFATWSP SKARLHLQGR SNAWRPQVNN |
| 1801 | PKEWLQVDFQ KTMKVTGVTT QGVKSLLTSM YVKEFLISSS QDGHQWTLFF |
| 1851 | QNGKVKVFQG NQDSFTPVVN SLDPPLLTRY LRIHPQSWVH QIALRMEVLG |
| 1901 | CEAQDLYDKT HTCPPCPAPE LLGGPSVFLF PPKPKDTLMI SRTPEVTCVV |
| 1951 | VDVSHEDPEV KFNWYVDGVE VHNAKTKPRE EQYNSTYRVV SVLTVLHQDW |
| 2001 | LNGKEYKCKV SNKALPAPIE KTISKAKGQP REPQVYTLPP SRDELTKNQV |
| 2051 | SLTCLVKGFY PSDIAVEWES NGQPENNYKT TPPVLDSDGS FFLYSKLTVD |
| 2101 | KSRWQQGNVF SCSVMHEALH NHYTQKSLSL SPGK* |

FVIII 203 Protein Sequence (Single Chain FVIIIFc with Two AE XTENs; One 288AE XTEN in B-Domain and One 144 AE XTEN at Amino Acid 1900) (SEQ ID NO: 77)

| | |
|---|---|
| 1 | MQIELSTCFF LCLLRFCFSA TRRYYLGAVE LSWDYMQSDL GELPVDARFP |
| 51 | PRVPKSFPFN TSVVYKKTLF VEFTDHLFNI AKPRPPWMGL LGPTIQAEVY |
| 101 | DTVVITLKNM ASHPVSLHAV GVSYWKASEG AEYDDQTSQR EKEDDKVFPG |
| 151 | GSHTYVWQVL KENGPMASDP LCLTYSYLSH VDLVKDLNSG LIGALLVCRE |
| 201 | GSLAKEKTQT LHKFILLFAV FDEGKSWHSE TKNSLMQDRD AASARAWPKM |
| 251 | HTVNGYVNRS LPGLIGCHRK SVYWHVIGMG TTPEVHSIFL EGHTFLVRNH |
| 301 | RQASLEISPI TFLTAQTLLM DLGQFLLFCH ISSHQHDGME AYVKVDSCPE |
| 351 | EPQLRMKNNE EAEDYDDDLT DSEMDVVRFD DDNSPSFIQI RSVAKKHPKT |
| 401 | WVHYIAAEEE DWDYAPLVLA PDDRSYKSQY LNNGPQRIGR KYKKVRFMAY |
| 451 | TDETFKTREA IQHESGILGP LLYGEVGDTL LIIFKNQASR PYNIYPHGIT |
| 501 | DVRPLYSRRL PKGVKHLKDF PILPGEIFKY KWTVTVEDGP TKSDPRCLTR |
| 551 | YYSSFVNMER DLASGLIGPL LICYKESVDQ RGNQIMSDKR NVILFSVFDE |
| 601 | NRSWYLTENI QRFLPNPAGV QLEDPEFQAS NIMHSINGYV FDSLQLSVCL |
| 651 | HEVAYWYILS IGAQTDFLSV FFSGYTFKHK MVYEDTLTLF PFSGETVFMS |
| 701 | MENPGLWILG CHNSDFRNRG MTALLKVSSC DKNTGDYYED SYEDISAYLL |
| 751 | SKNNAIEPRS FSQNGAPGTS ESATPESGPG SEPATSGSET PGTSESATPE |
| 801 | SGPGSEPATS GSETPGTSES ATPESGPGTS TEPSEGSAPG SPAGSPTSTE |
| 851 | EGTSESATPE SGPGSEPATS GSETPGTSES ATPESGPGSP AGSPTSTEEG |
| 901 | SPAGSPTSTE EGTSTEPSEG SAPGTSESAT PESGPGTSES ATPESGPGTS |
| 951 | ESATPESGPG SEPATSGSET PGSEPATSGS ETPGSPAGSP TSTEEGTSTE |
| 1001 | PSEGSAPGTS TEPSEGSAPG SEPATSGSET PGTSESATPE SGPGTSTEPS |
| 1051 | EGSAPASSPP VLKRHQAEIT RTTLQSDQEE IDYDDTISVE MKKEDFDIYD |
| 1101 | EDENQSPRSF QKKTRHYFIA AVERLWDYGM SSSPHVLRNR AQSGSVPQFK |
| 1151 | KVVFQEFTDG SFTQPLYRGE LNEHLGLLGP YIRAEVEDNI MVTFRNQASR |
| 1201 | PYSFYSSLIS YEEDQRQGAE PRKNFVKPNE TKTYFWKVQH HMAPTKDEFD |
| 1251 | CKAWAYFSDV DLEKDVHSGL IGPLLVCHTN TLNPAHGRQV TVQEFALFFT |
| 1301 | IFDETKSWYF TENMERNCRG APTSESATPE SGPGSEPATS GSETPGTSES |
| 1351 | ATPESGPGSE PATSGSETPG TSESATPESG PGTSTEPSEG SAPGTSESAT |
| 1401 | PESGPGSPAG SPTSTEEGSP AGSPTSTEEG SPAGSPTSTE EGTSESATPE |
| 1451 | SGPGTSTEPS EGSAPGASSA PCNIQMEDPT FKENYRFHAI NGYIMDTLPG |
| 1501 | LVMAQDQRIR WYLLSMGSNE NIHSIHFSGH VFTVRKKEEY KMALYNLYPG |
| 1551 | VFETVEMLPS KAGIWRVECL IGEHLHAGMS TLFLVYSNKC QTPLGMASGH |
| 1601 | IRDFQITASG QYGQWAPKLA RLHYSGSINA WSTKEPFSWI KVDLLAPMII |
| 1651 | HGIKTQGARQ KFSSLYISQF IIMYSLDGKK WQTYRGNSTG TLMVFFGNVD |
| 1701 | SSGIKHNIFN PPIIARYIRL HPTHYSIRST LRMELMGCDL NSCSMPLGME |
| 1751 | SKAISDAQIT ASSYFTNMFA TWSPSKARLH LQGRSNAWRP QVNNPKEWLQ |
| 1801 | VDFQKTMKVT GVTTQGVKSL LTSMYVKEFL ISSSQDGHQW TLFFQNGKVK |
| 1851 | VFQGNQDSFT PVVNSLDPPL LTRYLRIHPQ SWVHQIALRM EVLGCEAQDL |
| 1901 | YDKTHTCPPC PAPELLGGPS VFLFPPKPKD TLMISRTPEV TCVVVDVSHE |
| 1951 | DPEVKFNWYV DGVEVHNAKT KPREEQYNST YRVVSVLTVL HQDWLNGKEY |
| 2001 | KCKVSNKALP APIEKTISKA KGQPREPQVY TLPPSRDELT KNQVSLTCLV |
| 2051 | KGFYPSDIAV EWESNGQPEN NYKTTPPVLD SDGSFFLYSK LTVDKSRWQQ |
| 2101 | GNVFSCSVMH EALHNHYTQK SLSLSPGK* |

FVIII 204 Protein Sequence (Single Chain FVIIIFc with Two AE XTENs; One 288AE XTEN in B-Domain and One 144 AE XTEN at Amino Acid 403) (SEQ ID NO: 78)

| | |
|---|---|
| 1 | MQIELSTCFF LCLLRFCFSA TRRYYLGAVE LSWDYMQSDL GELPVDARFP |
| 51 | PRVPKSFPFN TSVVYKKTLF VEFTDHLFNI AKPRPPWMGL LGPTIQAEVY |
| 101 | DTVVITLKNM ASHPVSLHAV GVSYWKASEG AEYDDQTSQR EKEDDKVFPG |
| 151 | GSHTYVWQVL KENGPMASDP LCLTYSYLSH VDLVKDLNSG LIGALLVCRE |
| 201 | GSLAKEKTQT LHKFILLFAV FDEGKSWHSE TKNSLMQDRD AASARAWPKM |
| 251 | HTVNGYVNRS LPGLIGCHRK SVYWHVIGMG TTPEVHSIFL EGHTFLVRNH |
| 301 | RQASLEISPI TFLTAQTLLM DLGQFLLFCH ISSHQHDGME AYVKVDSCPE |
| 351 | EPQLRMKNNE EAEDYDDDLT DSEMDVVRFD DDNSPSFIQI RSVAKKHPKT |
| 401 | WVHYIAAEEE DWDYAPLVLA PDGAPTSTEP SEGSAPGSPA GSPTSTEEGT |
| 451 | STEPSEGSAP GTSTEPSEGS APGTSESATP ESGPGTSTEP SEGSAPGTSE |
| 501 | SATPESGPGS EPATSGSETP GTSTEPSEGS APGTSTEPSE GSAPGTSESA |
| 551 | TPESGPGTSE SATPESGPGA SSDRSYKSQY LNNGPQRIGR KYKKVRFMAY |
| 601 | TDETFKTREA IQHESGILGP LLYGEVGDTL LIIFKNQASR PYNIYPHGIT |
| 651 | DVRPLYSRRL PKGVKHLKDF PILPGEIFKY KWTVTVEDGP TKSDPRCLTR |
| 701 | YYSSFVNMER DLASGLIGPL LICYKESVDQ RGNQIMSDKR NVILFSVFDE |
| 751 | NRSWYLTENI QRFLPNPAGV QLEDPEFQAS NIMHSINGYV FDSLQLSVCL |
| 801 | HEVAYWYILS IGAQTDFLSV FFSGYTFKHK MVYEDTLTLF PFSGETVFMS |
| 851 | MENPGLWILG CHNSDFRNRG MTALLKVSSC DKNTGDYYED SYEDISAYLL |
| 901 | SKNNAIEPRS FSQNGAPGTS ESATPESGPG SEPATSGSET PGTSESATPE |
| 951 | SGPGSEPATS GSETPGTSES ATPESGPGTS TEPSEGSAPG SPAGSPTSTE |
| 1001 | EGTSESATPE SGPGSEPATS GSETPGTSES ATPESGPGSP AGSPTSTEEG |
| 1051 | SPAGSPTSTE EGTSTEPSEG SAPGTSESAT PESGPGTSES ATPESGPGTS |
| 1101 | ESATPESGPG SEPATSGSET PGSEPATSGS ETPGSPAGSP TSTEEGTSTE |
| 1151 | PSEGSAPGTS TEPSEGSAPG SEPATSGSET PGTSESATPE SGPGTSTEPS |
| 1201 | EGSAPASSPP VLKRHQAEIT RTTLQSDQEE IDYDDTISVE MKKEDFDIYD |
| 1251 | EDENQSPRSF QKKTRHYFIA AVERLWDYGM SSSPHVLRNR AQSGSVPQFK |
| 1301 | KVVFQEFTDG SFTQPLYRGE LNEHLGLLGP YIRAEVEDNI MVTFRNQASR |
| 1351 | PYSFYSSLIS YEEDQRQGAE PRKNFVKPNE TKTYFWKVQH HMAPTKDEFD |
| 1401 | CKAWAYFSDV DLEKDVHSGL IGPLLVCHTN TLNPAHGRQV TVQEFALFFT |
| 1451 | IFDETKSWYF TENMERNCRA PCNIQMEDPT FKENYRFHAI NGYIMDTLPG |
| 1501 | LVMAQDQRIR WYLLSMGSNE NIHSIHFSGH VFTVRKKEEY KMALYNLYPG |
| 1551 | VFETVEMLPS KAGIWRVECL IGEHLHAGMS TLFLVYSNKC QTPLGMASGH |
| 1601 | IRDFQITASG QYGQWAPKLA RLHYSGSINA WSTKEPFSWI KVDLLAPMII |
| 1651 | HGIKTQGARQ KFSSLYISQF IIMYSLDGKK WQTYRGNSTG TLMVFFGNVD |
| 1701 | SSGIKHNIFN PPIIARYIRL HPTHYSIRST LRMELMGCDL NSCSMPLGME |
| 1751 | SKAISDAQIT ASSYFTNMFA TWSPSKARLH LQGRSNAWRP QVNNPKEWLQ |
| 1801 | VDFQKTMKVT GVTTQGVKSL LTSMYVKEFL ISSSQDGHQW TLFFQNGKVK |
| 1851 | VFQGNQDSFT PVVNSLDPPL LTRYLRIHPQ SWVHQIALRM EVLGCEAQDL |
| 1901 | YDKTHTCPPC PAPELLGGPS VFLFPPKPKD TLMISRTPEV TCVVVDVSHE |
| 1951 | DPEVKFNWYV DGVEVHNAKT KPREEQYNST YRVVSVLTVL HQDWLNGKEY |
| 2001 | KCKVSNKALP APIEKTISKA KGQPREPQVY TLPPSRDELT KNQVSLTCLV |
| 2051 | KGFYPSDIAV EWESNGQPEN NYKTTPPVLD SDGSFFLYSK LTVDKSRWQQ |
| 2101 | GNVFSCSVMH EALHNHYTQK SLSLSPGK* |

FVIII 205 Protein Sequence (Single Chain FVIIIFc with Two AE XTENs; One 288AE XTEN in B-Domain and One 144 AE XTEN at Amino Acid 18) (SEQ ID NO: 79)

| | |
|---|---|
| 1 | MQIELSTCFF LCLLRFCFSA TRRYYLGAVE LSWDYMQGAP TSESATPESG |
| 51 | PGSEPATSGS ETPGTSESAT PESGPGSEPA TSGSETPGTS ESATPESGPG |
| 101 | TSTEPSEGSA PGSPAGSPTS TEEGTSESAT PESGPGSEPA TSGSETPGTS |
| 151 | ESATPESGPG SPAGSPTSTE EGSPAGSPTS TEEGASSSDL GELPVDARFP |
| 201 | PRVPKSFPFN TSVVYKKTLF VEFTDHLFNI AKPRPPWMGL LGPTIQAEVY |
| 251 | DTVVITLKNM ASHPVSLHAV GVSYWKASEG AEYDDQTSQR EKEDDKVFPG |
| 301 | GSHTYVWQVL KENGPMASDP LCLTYSYLSH VDLVKDLNSG LIGALLVCRE |
| 351 | GSLAKEKTQT LHKFILLFAV FDEGKSWHSE TKNSLMQDRD AASARAWPKM |
| 401 | HTVNGYVNRS LPGLIGCHRK SVYWHVIGMG TTPEVHSIFL EGHTFLVRNH |
| 451 | RQASLEISPI TFLTAQTLLM DLGQFLLFCH ISSHQHDGME AYVKVDSCPE |
| 501 | EPQLRMKNNE EAEDYDDDLT DSEMDVVRFD DDNSPSFIQI RSVAKKHPKT |
| 551 | WVHYIAAEEE DWDYAPLVLA PDDRSYKSQY LNNGPQRIGR KYKKVRFMAY |
| 601 | TDETFKTREA IQHESGILGP LLYGEVGDTL LIIFKNQASR PYNIYPHGIT |
| 651 | DVRPLYSRRL PKGVKHLKDF PILPGEIFKY KWTVTVEDGP TKSDPRCLTR |
| 701 | YYSSFVNMER DLASGLIGPL LICYKESVDQ RGNQIMSDKR NVILFSVFDE |
| 751 | NRSWYLTENI QRFLPNPAGV QLEDPEFQAS NIMHSINGYV FDSLQLSVCL |
| 801 | HEVAYWYILS IGAQTDFLSV FFSGYTFKHK MVYEDTLTLF PFSGETVFMS |
| 851 | MENPGLWILG CHNSDFRNRG MTALLKVSSC DKNTGDYYED SYEDISAYLL |
| 901 | SKNNAIEPRS FSQNGAPGTS ESATPESGPG SEPATSGSET PGTSESATPE |
| 951 | SGPGSEPATS GSETPGTSES ATPESGPGTS TEPSEGSAPG SPAGSPTSTE |
| 1001 | EGTSESATPE SGPGSEPATS GSETPGTSES ATPESGPGSP AGSPTSTEEG |
| 1051 | SPAGSPTSTE EGTSTEPSEG SAPGTSESAT PESGPGTSES ATPESGPGTS |
| 1101 | ESATPESGPG SEPATSGSET PGSEPATSGS ETPGSPAGSP TSTEEGTSTE |
| 1151 | PSEGSAPGTS TEPSEGSAPG SEPATSGSET PGTSESATPE SGPGTSTEPS |
| 1201 | EGSAPASSPP VLKRHQAEIT RTTLQSDQEE IDYDDTISVE MKKEDFDIYD |
| 1251 | EDENQSPRSF QKKTRHYFIA AVERLWDYGM SSSPHVLRNR AQSGSVPQFK |
| 1301 | KVVFQEFTDG SFTQPLYRGE LNEHLGLLGP YIRAEVEDNI MVTFRNQASR |
| 1351 | PYSFYSSLIS YEEDQRQGAE PRKNFVKPNE TKTYFWKVQH HMAPTKDEFD |
| 1401 | CKAWAYFSDV DLEKDVHSGL IGPLLVCHTN TLNPAHGRQV TVQEFALFFT |
| 1451 | IFDETKSWYF TENMERNCRA PCNIQMEDPT FKENYRFHAI NGYIMDTLPG |
| 1501 | LVMAQDQRIR WYLLSMGSNE NIHSIHFSGH VFTVRKKEEY KMALYNLYPG |
| 1551 | VFETVEMLPS KAGIWRVECL IGEHLHAGMS TLFLVYSNKC QTPLGMASGH |
| 1601 | IRDFQITASG QYGQWAPKLA RLHYSGSINA WSTKEPFSWI KVDLLAPMII |
| 1651 | HGIKTQGARQ KFSSLYISQF IIMYSLDGKK WQTYRGNSTG TLMVFFGNVD |
| 1701 | SSGIKHNIFN PPIIARYIRL HPTHYSIRST LRMELMGCDL NSCSMPLGME |
| 1751 | SKAISDAQIT ASSYFTNMFA TWSPSKARLH LQGRSNAWRP QVNNPKEWLQ |
| 1801 | VDFQKTMKVT GVTTQGVKSL LTSMYVKEFL ISSSQDGHQW TLFFQNGKVK |
| 1851 | VFQGNQDSFT PVVNSLDPPL LTRYLRIHPQ SWVHQIALRM EVLGCEAQDL |
| 1901 | YDKTHTCPPC PAPELLGGPS VFLFPPKPKD TLMISRTPEV TCVVVDVSHE |
| 1951 | DPEVKFNWYV DGVEVHNAKT KPREEQYNST YRVVSVLTVL HQDWLNGKEY |
| 2001 | KCKVSNKALP APIEKTISKA KGQPREPQVY TLPPSRDELT KNQVSLTCLV |
| 2051 | KGFYPSDIAV EWESNGQPEN NYKTTPPVLD SDGSFFLYSK LTVDKSRWQQ |
| 2101 | GNVFSCSVMH EALHNHYTQK SLSLSPGK* |

pSYN FVIII 266 Protein Sequence (FVIII Fc with 42 AE-XTEN at Amino Acid 18 and 288 AE XTEN in B-Domain) SEQ ID NO: 80)

| | |
|---|---|
| 1 | MQIELSTCFF LCLLRFCFSA TRRYYLGAVE LSWDYMQGAP GSPAGSPTST |
| 51 | EEGTSESATP ESGPGSEPAT SGSETPASSS DLGELPVDAR FPPRVPKSFP |
| 101 | FNTSVVYKKT LFVEFTDHLF NIAKPRPPWM GLLGPTIQAE VYDTVVITLK |
| 151 | NMASHPVSLH AVGVSYWKAS EGAEYDDQTS QREKEDDKVF PGGSHTYVWQ |
| 201 | VLKENGPMAS DPLCLTYSYL SHVDLVKDLN SGLIGALLVC REGSLAKEKT |
| 251 | QTLHKFILLF AVFDEGKSWH SETKNSLMQD RDAASARAWP KMHTVNGYVN |
| 301 | RSLPGLIGCH RKSVYWHVIG MGTTPEVHSI FLEGHTFLVR NHRQASLEIS |
| 351 | PITFLTAQTL LMDLGQFLLF CHISSHQHDG MEAYVKVDSC PEEPQLRMKN |
| 401 | NEEAEDYDDD LTDSEMDVVR FDDDNSPSFI QIRSVAKKHP KTWVHYIAAE |
| 451 | EEDWDYAPLV LAPDDRSYKS QYLNNGPQRI GRKYKKVRFM AYTDETFKTR |
| 501 | EAIQHESGIL GPLLYGEVGD TLLIIFKNQA SRPYNIYPHG ITDVRPLYSR |
| 551 | RLPKGVKHLK DFPILPGEIF KYKWTVTVED GPTKSDPRCL TRYYSSFVNM |
| 601 | ERDLASGLIG PLLICYKESV DQRGNQIMSD KRNVILFSVF DENRSWYLTE |
| 651 | NIQRFLPNPA GVQLEDPEFQ ASNIMHSING YVFDSLQLSV CLHEVAYWYI |
| 701 | LSIGAQTDFL SVFFSGYTFK HKMVYEDTLT LFPFSGETVF MSMENPGLWI |
| 751 | LGCHNSDFRN RGMTALLKVS SCDKNTGDYY EDSYEDISAY LLSKNNAIEP |
| 801 | RSFSQNGAPG TSESATPESG PGSEPATSGS ETPGTSESAT PESGPGSEPA |
| 851 | TSGSETPGTS ESATPESGPG TSTEPSEGSA PGSPAGSPTS TEEGTSESAT |
| 901 | PESGPGSEPA TSGSETPGTS ESATPESGPG SPAGSPTSTE EGSPAGSPTS |
| 951 | TEEGTSTEPS EGSAPGTSES ATPESGPGTS ESATPESGPG TSESATPESG |
| 1001 | PGSEPATSGS ETPGSEPATS GSETPGSPAG SPTSTEEGTS TEPSEGSAPG |
| 1051 | TSTEPSEGSA PGSEPATSGS ETPGTSESAT PESGPGTSTE PSEGSAPASS |
| 1101 | PPVLKRHQAE ITRTTLQSDQ EEIDYDDTIS VEMKKEDFDI YDEDENQSPR |
| 1151 | SFQKKTRHYF IAAVERLWDY GMSSSPHVLR NRAQSGSVPQ FKKVVFQEFT |
| 1201 | DGSFTQPLYR GELNEHLGLL GPYIRAEVED NIMVTFRNQA SRPYSFYSSL |
| 1251 | ISYEEDQRQG AEPRKNFVKP NETKTYFWKV QHHMAPTKDE FDCKAWAYFS |
| 1301 | DVDLEKDVHS GLIGPLLVCH TNTLNPAHGR QVTVQEFALF FTIFDETKSW |
| 1351 | YFTENMERNC RAPCNIQMED PTFKENYRFH AINGYIMDTL PGLVMAQDQR |
| 1401 | IRWYLLSMGS NENIHSIHFS GHVFTVRKKE EYKMALYNLY PGVFETVEML |
| 1451 | PSKAGIWRVE CLIGEHLHAG MSTLFLVYSN KCQTPLGMAS GHIRDFQITA |
| 1501 | SGQYGQWAPK LARLHYSGSI NAWSTKEPFS WIKVDLLAPM IIHGIKTQGA |
| 1551 | RQKFSSLYIS QFIIMYSLDG KKWQTYRGNS TGTLMVFFGN VDSSGIKHNI |
| 1601 | FNPPIIARYI RLHPTHYSIR STLRMELMGC DLNSCSMPLG MESKAISDAQ |
| 1651 | ITASSYFTNM FATWSPSKAR LHLQGRSNAW RPQVNNPKEW LQVDFQKTMK |
| 1701 | VTGVTTQGVK SLLTSMYVKE FLISSSQDGH QWTLFFQNGK VKVFQGNQDS |
| 1751 | FTPVVNSLDP PLLTRYLRIH PQSWVHQIAL RMEVLGCEAQ DLYDKTHTCP |
| 1801 | PCPAPELLGG PSVFLFPPKP KDTLMISRTP EVTCVVVDVS HEDPEVKFNW |
| 1851 | YVDGVEVHNA KTKPREEQYN STYRVVSVLT VLHQDWLNGK EYKCKVSNKA |
| 1901 | LPAPIEKTIS KAKGQPREPQ VYTLPPSRDE LTKNQVSLTC LVKGFYPSDI |
| 1951 | AVEWESNGQP ENNYKTTPPV LDSDGSFFLY SKLTVDKSRW QQGNVFSCSV |
| 2001 | MHEALHNHYT QKSLSLSPGK * |

pSYN FVIII 267 Protein Sequence (FVIII Fc with 72 AE-XTEN at Amino Acid 18 and 288 AE XTEN in B-Domain) SEQ ID NO: 81)

| | |
|---|---|
| 1 | MQIELSTCFF LCLLRFCFSA TRRYYLGAVE LSWDYMQGAP TSESATPESG |
| 51 | PGSEPATSGS ETPGTSESAT PESGPGSEPA TSGSETPGTS ESATPESGPG |
| 101 | TSTEPSEGSA PGASSSDLGE LPVDARFPPR VPKSFPFNTS VVYKKTLFVE |
| 151 | FTDHLFNIAK PRPPWMGLLG PTIQAEVYDT VVITLKNMAS HPVSLHAVGV |
| 201 | SYWKASEGAE YDDQTSQREK EDDKVFPGGS HTYVWQVLKE NGPMASDPLC |
| 251 | LTYSYLSHVD LVKDLNSGLI GALLVCREGS LAKEKTQTLH KFILLFAVFD |
| 301 | EGKSWHSETK NSLMQDRDAA SARAWPKMHT VNGYVNRSLP GLIGCHRKSV |
| 351 | YWHVIGMGTT PEVHSIFLEG HTFLVRNHRQ ASLEISPITF LTAQTLLMDL |
| 401 | GQFLLFCHIS SHQHDGMEAY VKVDSCPEEP QLRMKNNEEA EDYDDDLTDS |
| 451 | EMDVVRFDDD NSPSFIQIRS VAKKHPKTWV HYIAAEEEDW DYAPLVLAPD |
| 501 | DRSYKSQYLN NGPQRIGRKY KKVRFMAYTD ETFKTREAIQ HESGILGPLL |
| 551 | YGEVGDTLLI IFKNQASRPY NIYPHGITDV RPLYSRRLPK GVKHLKDFPI |
| 601 | LPGEIFKYKW TVTVEDGPTK SDPRCLTRYY SSFVNMERDL ASGLIGPLLI |
| 651 | CYKESVDQRG NQIMSDKRNV ILFSVFDENR SWYLTENIQR FLPNPAGVQL |
| 701 | EDPEFQASNI MHSINGYVFD SLQLSVCLHE VAYWYILSIG AQTDFLSVFF |
| 751 | SGYTFKHKMV YEDTLTLFPF SGETVFMSME NPGLWILGCH NSDFRNRGMT |
| 801 | ALLKVSSCDK NTGDYYEDSY EDISAYLLSK NNAIEPRSFS QNGAPGTSES |
| 851 | ATPESGPGSE PATSGSETPG TSESATPESG PGSEPATSGS ETPGTSESAT |
| 901 | PESGPGTSTE PSEGSAPGSP AGSPTSTEEG TSESATPESG PGSEPATSGS |
| 951 | ETPGTSESAT PESGPGSPAG SPTSTEEGSP AGSPTSTEEG TSTEPSEGSA |
| 1001 | PGTSESATPE SGPGTSESAT PESGPGTSES ATPESGPGSE PATSGSETPG |
| 1051 | SEPATSGSET PGSPAGSPTS TEEGTSTEPS EGSAPGTSTE PSEGSAPGSE |
| 1101 | PATSGSETPG TSESATPESG PGTSTEPSEG SAPASSPPVL KRHQAEITRT |
| 1151 | TLQSDQEEID YDDTISVEMK KEDFDIYDED ENQSPRSFQK KTRHYFIAAV |
| 1201 | ERLWDYGMSS SPHVLRNRAQ SGSVPQFKKV VFQEFTDGSF TQPLYRGELN |
| 1251 | EHLGLLGPYI RAEVEDNIMV TFRNQASRPY SFYSSLISYE EDQRQGAEPR |
| 1301 | KNFVKPNETK TYFWKVQHHM APTKDEFDCK AWAYFSDVDL EKDVHSGLIG |
| 1351 | PLLVCHTNTL NPAHGRQVTV QEFALFFTIF DETKSWYFTE NMERNCRAPC |
| 1401 | NIQMEDPTFK ENYRFHAING YIMDTLPGLV MAQDQRIRWY LLSMGSNENI |
| 1451 | HSIHFSGHVF TVRKKEEYKM ALYNLYPGVF ETVEMLPSKA GIWRVECLIG |
| 1501 | EHLHAGMSTL FLVYSNKCQT PLGMASGHIR DFQITASGQY GQWAPKLARL |
| 1551 | HYSGSINAWS TKEPFSWIKV DLLAPMIIHG IKTQGARQKF SSLYISQFII |
| 1601 | MYSLDGKKWQ TYRGNSTGTL MVFFGNVDSS GIKHNIFNPP IIARYIRLHP |
| 1651 | THYSIRSTLR MELMGCDLNS CSMPLGMESK AISDAQITAS SYFTNMFATW |
| 1701 | SPSKARLHLQ GRSNAWRPQV NNPKEWLQVD FQKTMKVTGV TTQGVKSLLT |
| 1751 | SMYVKEFLIS SSQDGHQWTL FFQNGKVKVF QGNQDSFTPV VNSLDPPLLT |
| 1801 | RYLRIHPQSW VHQIALRMEV LGCEAQDLYD KTHTCPPCPA PELLGGPSVF |
| 1851 | LFPPKPKDTL MISRTPEVTC VVVDVSHEDP EVKFNWYVDG VEVHNAKTKP |
| 1901 | REEQYNSTYR VVSVLTVLHQ DWLNGKEYKC KVSNKALPAP IEKTISKAKG |
| 1951 | QPREPQVYTL PPSRDELTKN QVSLTCLVKG FYPSDIAVEW ESNGQPENNY |
| 2001 | KTTPPVLDSD GSFFLYSKLT VDKSRWQQGN VFSCSVMHEA LHNHYTQKSL |
| 2051 | SLSPGK* |

pSYN FVIII 268 Protein Sequence (FVIII Fc with 144 AE-XTEN at Amino Acid 18) SEQ ID NO: 82)

| | |
|---|---|
| 1 | MQIELSTCFF LCLLRFCFSA TRRYYLGAVE LSWDYMQGAP TSESATPESG |
| 51 | PGSEPATSGS ETPGTSESAT PESGPGSEPA TSGSETPGTS ESATPESGPG |
| 101 | TSTEPSEGSA PGSPAGSPTS TEEGTSESAT PESGPGSEPA TSGSETPGTS |
| 151 | ESATPESGPG SPAGSPTSTE EGSPAGSPTS TEEGASSSDL GELPVDARFP |
| 201 | PRVPKSFPFN TSVVYKKTLF VEFTDHLFNI AKPRPPWMGL LGPTIQAEVY |
| 251 | DTVVITLKNM ASHPVSLHAV GVSYWKASEG AEYDDQTSQR EKEDDKVFPG |
| 301 | GSHTYVWQVL KENGPMASDP LCLTYSYLSH VDLVKDLNSG LIGALLVCRE |
| 351 | GSLAKEKTQT LHKFILLFAV FDEGKSWHSE TKNSLMQDRD AASARAWPKM |
| 401 | HTVNGYVNRS LPGLIGCHRK SVYWHVIGMG TTPEVHSIFL EGHTFLVRNH |
| 451 | RQASLEISPI TFLTAQTLLM DLGQFLLFCH ISSHQHDGME AYVKVDSCPE |
| 501 | EPQLRMKNNE EAEDYDDDLT DSEMDVVRFD DDNSPSFIQI RSVAKKHPKT |
| 551 | WVHYIAAEEE DWDYAPLVLA PDDRSYKSQY LNNGPQRIGR KYKKVRFMAY |
| 601 | TDETFKTREA IQHESGILGP LLYGEVGDTL LIIFKNQASR PYNIYPHGIT |
| 651 | DVRPLYSRRL PKGVKHLKDF PILPGEIFKY KWTVTVEDGP TKSDPRCLTR |
| 701 | YYSSFVNMER DLASGLIGPL LICYKESVDQ RGNQIMSDKR NVILFSVFDE |
| 751 | NRSWYLTENI QRFLPNPAGV QLEDPEFQAS NIMHSINGYV FDSLQLSVCL |
| 801 | HEVAYWYILS IGAQTDFLSV FFSGYTFKHK MVYEDTLTLF PFSGETVFMS |
| 851 | MENPGLWILG CHNSDFRNRG MTALLKVSSC DKNTGDYYED SYEDISAYLL |
| 901 | SKNNAIEPRS FSQNPPVLKR HQAEITRTTL QSDQEEIDYD DTISVEMKKE |
| 951 | DFDIYDEDEN QSPRSFQKKT RHYFIAAVER LWDYGMSSSP HVLRNRAQSG |
| 1001 | SVPQFKKVVF QEFTDGSFTQ PLYRGELNEH LGLLGPYIRA EVEDNIMVTF |
| 1051 | RNQASRPYSF YSSLISYEED QRQGAEPRKN FVKPNETKTY FWKVQHHMAP |
| 1101 | TKDEFDCKAW AYFSDVDLEK DVHSGLIGPL LVCHTNTLNP AHGRQVTVQE |
| 1151 | FALFFTIFDE TKSWYFTENM ERNCRAPCNI QMEDPTFKEN YRFHAINGYI |
| 1201 | MDTLPGLVMA QDQRIRWYLL SMGSNENIHS IHFSGHVFTV RKKEEYKMAL |
| 1251 | YNLYPGVFET VEMLPSKAGI WRVECLIGEH LHAGMSTLFL VYSNKCQTPL |
| 1301 | GMASGHIRDF QITASGQYGQ WAPKLARLHY SGSINAWSTK EPFSWIKVDL |
| 1351 | LAPMIIHGIK TQGARQKFSS LYISQFIIMY SLDGKKWQTY RGNSTGTLMV |
| 1401 | FFGNVDSSGI KHNIFNPPII ARYIRLHPTH YSIRSTLRME LMGCDLNSCS |
| 1451 | MPLGMESKAI SDAQITASSY FTNMFATWSP SKARLHLQGR SNAWRPQVNN |
| 1501 | PKEWLQVDFQ KTMKVTGVTT QGVKSLLTSM YVKEFLISSS QDGHQWTLFF |
| 1551 | QNGKVKVFQG NQDSFTPVVN SLDPPLLTRY LRIHPQSWVH QIALRMEVLG |
| 1601 | CEAQDLYDKT HTCPPCPAPE LLGGPSVFLF PPKPKDTLMI SRTPEVTCVV |
| 1651 | VDVSHEDPEV KFNWYVDGVE VHNAKTKPRE EQYNSTYRVV SVLTVLHQDW |
| 1701 | LNGKEYKCKV SNKALPAPIE KTISKAKGQP REPQVYTLPP SRDELTKNQV |
| 1751 | SLTCLVKGFY PSDIAVEWES NGQPENNYKT TPPVLDSDGS FFLYSKLTVD |
| 1801 | KSRWQQGNVF SCSVMHEALH NHYTQKSLSL SPGK* |

pSYN FVIII 269 Protein Sequence (FVIII Fc with 72 AE-XTEN at Amino Acid 18) SEQ ID NO: 83)

| | |
|---|---|
| 1 | MQIELSTCFF LCLLRFCFSA TRRYYLGAVE LSWDYMQGAP TSESATPESG |
| 51 | PGSEPATSGS ETPGTSESAT PESGPGSEPA TSGSETPGTS ESATPESGPG |
| 101 | TSTEPSEGSA PGASSSDLGE LPVDARFPPR VPKSFPFNTS VVYKKTLFVE |
| 151 | FTDHLFNIAK PRPPWMGLLG PTIQAEVYDT VVITLKNMAS HPVSLHAVGV |
| 201 | SYWKASEGAE YDDQTSQREK EDDKVFPGGS HTYVWQVLKE NGPMASDPLC |
| 251 | LTYSYLSHVD LVKDLNSGLI GALLVCREGS LAKEKTQTLH KFILLFAVFD |
| 301 | EGKSWHSETK NSLMQDRDAA SARAWPKMHT VNGYVNRSLP GLIGCHRKSV |
| 351 | YWHVIGMGTT PEVHSIFLEG HTFLVRNHRQ ASLEISPITF LTAQTLLMDL |
| 401 | GQFLLFCHIS SHQHDGMEAY VKVDSCPEEP QLRMKNNEEA EDYDDDLTDS |
| 451 | EMDVVRFDDD NSPSFIQIRS VAKKHPKTWV HYIAAEEEDW DYAPLVLAPD |
| 501 | DRSYKSQYLN NGPQRIGRKY KKVRFMAYTD ETFKTREAIQ HESGILGPLL |
| 551 | YGEVGDTLLI IFKNQASRPY NIYPHGITDV RPLYSRRLPK GVKHLKDFPI |
| 601 | LPGEIFKYKW TVTVEDGPTK SDPRCLTRYY SSFVNMERDL ASGLIGPLLI |
| 651 | CYKESVDQRG NQIMSDKRNV ILFSVFDENR SWYLTENIQR FLPNPAGVQL |
| 701 | EDPEFQASNI MHSINGYVFD SLQLSVCLHE VAYWYILSIG AQTDFLSVFF |
| 751 | SGYTFKHKMV YEDTLTLFPF SGETVFMSME NPGLWILGCH NSDFRNRGMT |
| 801 | ALLKVSSCDK NTGDYYEDSY EDISAYLLSK NNAIEPRSFS QNPPVLKRHQ |
| 851 | AEITRTTLQS DQEEIDYDDT ISVEMKKEDF DIYDEDENQS PRSFQKKTRH |
| 901 | YFIAAVERLW DYGMSSSPHV LRNRAQSGSV PQFKKVVFQE FTDGSFTQPL |
| 951 | YRGELNEHLG LLGPYIRAEV EDNIMVTFRN QASRPYSFYS SLISYEEDQR |
| 1001 | QGAEPRKNFV KPNETKTYFW KVQHHMAPTK DEFDCKAWAY FSDVDLEKDV |
| 1051 | HSGLIGPLLV CHTNTLNPAH GRQVTVQEFA LFFTIFDETK SWYFTENMER |
| 1101 | NCRAPCNIQM EDPTFKENYR FHAINGYIMD TLPGLVMAQD QRIRWYLLSM |
| 1151 | GSNENIHSIH FSGHVFTVRK KEEYKMALYN LYPGVFETVE MLPSKAGIWR |
| 1201 | VECLIGEHLH AGMSTLFLVY SNKCQTPLGM ASGHIRDFQI TASGQYGQWA |
| 1251 | PKLARLHYSG SINAWSTKEP FSWIKVDLLA PMIIHGIKTQ GARQKFSSLY |
| 1301 | ISQFIIMYSL DGKKWQTYRG NSTGTLMVFF GNVDSSGIKH NIFNPPIIAR |
| 1351 | YIRLHPTHYS IRSTLRMELM GCDLNSCSMP LGMESKAISD AQITASSYFT |
| 1401 | NMFATWSPSK ARLHLQGRSN AWRPQVNNPK EWLQVDFQKT MKVTGVTTQG |
| 1451 | VKSLLTSMYV KEFLISSSQD GHQWTLFFQN GKVKVFQGNQ DSFTPVVNSL |
| 1501 | DPPLLTRYLR IHPQSWVHQI ALRMEVLGCE AQDLYDKTHT CPPCPAPELL |
| 1551 | GGPSVFLFPP KPKDTLMISR TPEVTCVVVD VSHEDPEVKF NWYVDGVEVH |
| 1601 | NAKTKPREEQ YNSTYRVVSV LTVLHQDWLN GKEYKCKVSN KALPAPIEKT |
| 1651 | ISKAKGQPRE PQVYTLPPSR DELTKNQVSL TCLVKGFYPS DIAVEWESNG |
| 1701 | QPENNYKTTP PVLDSDGSFF LYSKLTVDKS RWQQGNVFSC SVMHEALHNH |
| 1751 | YTQKSLSLSP GK* |

pSYNFVIII 271 Protein Sequence (FVIII Fc with 42 AE-XTEN at Amino Acid 18) SEQ ID NO: 84)

| | |
|---|---|
| 1 | MQIELSTCFF LCLLRFCFSA TRRYYLGAVE LSWDYMQGAP GSPAGSPTST |
| 51 | EEGTSESATP ESGPGSEPAT SGSETPASSS DLGELPVDAR FPPRVPKSFP |
| 101 | FNTSVVYKKT LFVEFTDHLF NIAKPRPPWM GLLGPTIQAE VYDTVVITLK |
| 151 | NMASHPVSLH AVGVSYWKAS EGAEYDDQTS QREKEDDKVF PGGSHTYVWQ |
| 201 | VLKENGPMAS DPLCLTYSYL SHVDLVKDLN SGLIGALLVC REGSLAKEKT |
| 251 | QTLHKFILLF AVFDEGKSWH SETKNSLMQD RDAASARAWP KMHTVNGYVN |
| 301 | RSLPGLIGCH RKSVYWHVIG MGTTPEVHSI FLEGHTFLVR NHRQASLEIS |
| 351 | PITFLTAQTL LMDLGQFLLF CHISSHQHDG MEAYVKVDSC PEEPQLRMKN |
| 401 | NEEAEDYDDD LTDSEMDVVR FDDDNSPSFI QIRSVAKKHP KTWVHYIAAE |
| 451 | EEDWDYAPLV LAPDDRSYKS QYLNNGPQRI GRKYKKVRFM AYTDETFKTR |
| 501 | EAIQHESGIL GPLLYGEVGD TLLIIFKNQA SRPYNIYPHG ITDVRPLYSR |
| 551 | RLPKGVKHLK DFPILPGEIF KYKWTVTVED GPTKSDPRCL TRYYSSFVNM |
| 601 | ERDLASGLIG PLLICYKESV DQRGNQIMSD KRNVILFSVF DENRSWYLTE |
| 651 | NIQRFLPNPA GVQLEDPEFQ ASNIMHSING YVFDSLQLSV CLHEVAYWYI |
| 701 | LSIGAQTDFL SVFFSGYTFK HKMVYEDTLT LFPFSGETVF MSMENPGLWI |
| 751 | LGCHNSDFRN RGMTALLKVS SCDKNTGDYY EDSYEDISAY LLSKNNAIEP |
| 801 | RSFSQNPPVL KRHQAEITRT TLQSDQEEID YDDTISVEMK KEDFDIYDED |
| 851 | ENQSPRSFQK KTRHYFIAAV ERLWDYGMSS SPHVLRNRAQ SGSVPQFKKV |
| 901 | VFQEFTDGSF TQPLYRGELN EHLGLLGPYI RAEVEDNIMV TFRNQASRPY |
| 951 | SFYSSLISYE EDQRQGAEPR KNFVKPNETK TYFWKVQHHM APTKDEFDCK |
| 1001 | AWAYFSDVDL EKDVHSGLIG PLLVCHTNTL NPAHGRQVTV QEFALFFTIF |
| 1051 | DETKSWYFTE NMERNCRAPC NIQMEDPTFK ENYRFHAING YIMDTLPGLV |
| 1101 | MAQDQRIRWY LLSMGSNENI HSIHFSGHVF TVRKKEEYKM ALYNLYPGVF |
| 1151 | ETVEMLPSKA GIWRVECLIG EHLHAGMSTL FLVYSNKCQT PLGMASGHIR |
| 1201 | DFQITASGQY GQWAPKLARL HYSGSINAWS TKEPFSWIKV DLLAPMIIHG |
| 1251 | IKTQGARQKF SSLYISQFII MYSLDGKKWQ TYRGNSTGTL MVFFGNVDSS |
| 1301 | GIKHNIFNPP IIARYIRLHP THYSIRSTLR MELMGCDLNS CSMPLGMESK |
| 1351 | AISDAQITAS SYFTNMFATW SPSKARLHLQ GRSNAWRPQV NNPKEWLQVD |
| 1401 | FQKTMKVTGV TTQGVKSLLT SMYVKEFLIS SSQDGHQWTL FFQNGKVKVF |
| 1451 | QGNQDSFTPV VNSLDPPLLT RYLRIHPQSW VHQIALRMEV LGCEAQDLYD |
| 1501 | KTHTCPPCPA PELLGGPSVF LFPPKPKDTL MISRTPEVTC VVVDVSHEDP |
| 1551 | EVKFNWYVDG VEVHNAKTKP REEQYNSTYR VVSVLTVLHQ DWLNGKEYKC |
| 1601 | KVSNKALPAP IEKTISKAKG QPREPQVYTL PPSRDELTKN QVSLTCLVKG |
| 1651 | FYPSDIAVEW ESNGQPENNY KTTPPVLDSD GSFFLYSKLT VDKSRWQQGN |
| 1701 | VFSCSVMHEA LHNHYTQKSL SLSPGK* |

pSYN FVIII Protein Sequence 272 (FVIII with 144 AE XTEN at Amino Acid 18 and 244 AE XTEN in B-Domain-No Fc) SEQ ID NO: 85)

| | |
|---|---|
| 1 | MQIELSTCFF LCLLRFCFSA TRRYYLGAVE LSWDYMQGAP TSESATPESG |
| 51 | PGSEPATSGS ETPGTSESAT PESGPGSEPA TSGSETPGTS ESATPESGPG |
| 101 | TSTEPSEGSA PGSPAGSPTS TEEGTSESAT PESGPGSEPA TSGSETPGTS |
| 151 | ESATPESGPG SPAGSPTSTE EGSPAGSPTS TEEGASSSDL GELPVDARFP |
| 201 | PRVPKSFPFN TSVVYKKTLF VEFTDHLFNI AKPRPPWMGL LGPTIQAEVY |
| 251 | DTVVITLKNM ASHPVSLHAV GVSYWKASEG AEYDDQTSQR EKEDDKVFPG |
| 301 | GSHTYVWQVL KENGPMASDP LCLTYSYLSH VDLVKDLNSG LIGALLVCRE |
| 351 | GSLAKEKTQT LHKFILLFAV FDEGKSWHSE TKNSLMQDRD AASARAWPKM |
| 401 | HTVNGYVNRS LPGLIGCHRK SVYWHVIGMG TTPEVHSIFL EGHTFLVRNH |
| 451 | RQASLEISPI TFLTAQTLLM DLGQFLLFCH ISSHQHDGME AYVKVDSCPE |
| 501 | EPQLRMKNNE EAEDYDDDLT DSEMDVVRFD DDNSPSFIQI RSVAKKHPKT |
| 551 | WVHYIAAEEE DWDYAPLVLA PDDRSYKSQY LNNGPQRIGR KYKKVRFMAY |
| 601 | TDETFKTREA IQHESGILGP LLYGEVGDTL LIIFKNQASR PYNIYPHGIT |
| 651 | DVRPLYSRRL PKGVKHLKDF PILPGEIFKY KWTVTVEDGP TKSDPRCLTR |
| 701 | YYSSFVNMER DLASGLIGPL LICYKESVDQ RGNQIMSDKR NVILFSVFDE |
| 751 | NRSWYLTENI QRFLPNPAGV QLEDPEFQAS NIMHSINGYV FDSLQLSVCL |
| 801 | HEVAYWYILS IGAQTDFLSV FFSGYTFKHK MVYEDTLTLF PFSGETVFMS |
| 851 | MENPGLWILG CHNSDFRNRG MTALLKVSSC DKNTGDYYED SYEDISAYLL |
| 901 | SKNNAIEPRS FSQNGAPGTS ESATPESGPG SEPATSGSET PGTSESATPE |
| 951 | SGPGSEPATS GSETPGTSES ATPESGPGTS TEPSEGSAPG SPAGSPTSTE |
| 1001 | EGTSESATPE SGPGSEPATS GSETPGTSES ATPESGPGSP AGSPTSTEEG |
| 1051 | SPAGSPTSTE EGTSTEPSEG SAPGTSESAT PESGPGTSES ATPESGPGTS |
| 1101 | ESATPESGPG SEPATSGSET PGSEPATSGS ETPGSPAGSP TSTEEGTSTE |
| 1151 | PSEGSAPGTS TEPSEGSAPG SEPATSGSET PGTSESATPE SGPGTSTEPS |
| 1201 | EGSAPASSPP VLKRHQAEIT RTTLQSDQEE IDYDDTISVE MKKEDFDIYD |
| 1251 | EDENQSPRSF QKKTRHYFIA AVERLWDYGM SSSPHVLRNR AQSGSVPQFK |
| 1301 | KVVFQEFTDG SFTQPLYRGE LNEHLGLLGP YIRAEVEDNI MVTFRNQASR |
| 1351 | PYSFYSSLIS YEEDQRQGAE PRKNFVKPNE TKTYFWKVQH HMAPTKDEFD |
| 1401 | CKAWAYFSDV DLEKDVHSGL IGPLLVCHTN TLNPAHGRQV TVQEFALFFT |
| 1451 | IFDETKSWYF TENMERNCRA PCNIQMEDPT FKENYRFHAI NGYIMDTLPG |
| 1501 | LVMAQDQRIR WYLLSMGSNE NIHSIHFSGH VFTVRKKEEY KMALYNLYPG |
| 1551 | VFETVEMLPS KAGIWRVECL IGEHLHAGMS TLFLVYSNKC QTPLGMASGH |
| 1601 | IRDFQITASG QYGQWAPKLA RLHYSGSINA WSTKEPFSWI KVDLLAPMII |
| 1651 | HGIKTQGARQ KFSSLYISQF IIMYSLDGKK WQTYRGNSTG TLMVFFGNVD |
| 1701 | SSGIKHNIFN PPIIARYIRL HPTHYSIRST LRMELMGCDL NSCSMPLGME |
| 1751 | SKAISDAQIT ASSYFTNMFA TWSPSKARLH LQGRSNAWRP QVNNPKEWLQ |
| 1801 | VDFQKTMKVT GVTTQGVKSL LTSMYVKEFL ISSSQDGHQW TLFFQNGKVK |
| 1851 | VFQGNQDSFT PVVNSLDPPL LTRYLRIHPQ SWVHQIALRM EVLGCEAQDL |
| 1901 | Y* |

pSYN-FVIII-161 Protein Sequence (SEQ ID NO: 69)
(FVIII sequence amino acid position 1-1457; underlined region represents Fc region; curvy underline represents cleavable linker in between first Fc and VWF fragment; double underlined region represents VWF fragment; bold region represents cleavable linker in between VWF fragment and Fc).

| | |
|---|---|
| 1 | MQIELSTCFF LCLLRFCFSA TRRYYLGAVE LSWDYMQSDL GELPVDARFP |
| 51 | PRVPKSFPFN TSVVYKKTLF VEFTDHLFNI AKPRPPWMGL LGPTIQAEVY |
| 101 | DTVVITLKNM ASHPVSLHAV GVSYWKASEG AEYDDQTSQR EKEDDKVFPG |
| 151 | GSHTYVWQVL KENGPMASDP LCLTYSYLSH VDLVKDLNSG LIGALLVCRE |
| 201 | GSLAKEKTQT LHKFILLFAV FDEGKSWHSE TKNSLMQDRD AASARAWPKM |
| 251 | HTVNGYVNRS LPGLIGCHRK SVYWHVIGMG TTPEVHSIFL EGHTFLVRNH |
| 301 | RQASLEISPI TFLTAQTLLM DLGQFLLFCH ISSHQHDGME AYVKVDSCPE |
| 351 | EPQLRMKNNE EAEDYDDDLT DSEMDVVRFD DDNSPSFIQI RSVAKKHPKT |
| 401 | WVHYIAAEEE DWDYAPLVLA PDDRSYKSQY LNNGPQRIGR KYKKVRFMAY |
| 451 | TDETFKTREA IQHESGILGP LLYGEVGDTL LIIFKNQASR PYNIYPHGIT |
| 501 | DVRPLYSRRL PKGVKHLKDF PILPGEIFKY KWTVTVEDGP TKSDPRCLTR |
| 551 | YYSSFVNMER DLASGLIGPL LICYKESVDQ RGNQIMSDKR NVILFSVFDE |
| 601 | NRSWYLTENI QRFLPNPAGV QLEDPEFQAS NIMHSINGYV FDSLQLSVCL |
| 651 | HEVAYWYILS IGAQTDFLSV FFSGYTFKHK MVYEDTLTLF PFSGETVFMS |
| 701 | MENPGLWILG CHNSDFRNRG MTALLKVSSC DKNTGDYYED SYEDISAYLL |
| 751 | SKNNAIEPRS FSQNPPVLKR HQREITRTTL QSDQEEIDYD DTISVEMKKE |
| 801 | DFDIYDEDEN QSPRSFQKKT RHYFIAAVER LWDYGMSSSP HVLRNRAQSG |
| 851 | SVPQFKKVVF QEFTDGSFTQ PLYRGELNEH LGLLGPYIRA EVEDNIMVTF |
| 901 | RNQASRPYSF YSSLISYEED QRQGAEPRKN FVKPNETKTY FWKVQHHMAP |
| 951 | TKDEFDCKAW AYFSDVDLEK DVHSGLIGPL LVCHTNTLNP AHGRQVTVQE |
| 1001 | FALFFTIFDE TKSWYFTENM ERNCRAPCNI QMEDPTFKEN YRFHAINGYI |
| 1051 | MDTLPGLVMA QDQRIRWYLL SMGSNENIHS IHFSGHVFTV RKKEEYKMAL |
| 1101 | YNLYPGVFET VEMLPSKAGI WRVECLIGEH LHAGMSTLFL VYSNKCQTPL |
| 1151 | GMASGHIRDF QITASGQYGQ WAPKLARLHY SGSINAWSTK EPFSWIKVDL |
| 1201 | LAPMIIHGIK TQGARQKFSS LYISQFIIMY SLDGKKWQTY RGNSTGTLMV |
| 1251 | FFGNVDSSGI KHNIFNPPII ARYIRLHPTH YSIRSTLRME LMGCDLNSCS |
| 1301 | MPLGMESKAI SDAQITASSY FTNMFATWSP SKARLHLQGR SNAWRPQVNN |
| 1351 | PKEWLQVDFQ KTMKVTGVTT QGVKSLLTSM YVKEFLISSS QDGHQWTLFF |
| 1401 | QNGKVKVFQG NQDSFTPVVN SLDPPLLTRY LRIHPQSWVH QIALRMEVLG |
| 1451 | CEAQDLYDKT HTCPPCPAPE LLGGPSVFLF PPKPKDTLMI SRTPEVTCVV |
| 1501 | VDVSHEDPEV KFNWYVDGVE VHNAKTKPRE EQYNSTYRVV SVLTVLHQDW |
| 1551 | LNGKEYKCKV SNKALPAPIE KTISKAKGQP REPQVYTLPP SRDELTKNQV |
| 1601 | SLTCLVKGFY PSDIAVEWES NGQPENNYKT TPPVLDSDGS FFLYSKLTVD |
| 1651 | [chemical structure] |
| 1701 | [chemical structure] |
| 1751 | TKTCQNYDLE CMSMGCVSGC LCPPGMVRHE NRCVALERCP CFHQGKEYAP |
| 1801 | GETVKIGCNT CVCRDRKWNC TDHVCDATCS TIGMAHYLTF DGLKYLFPGE |
| 1851 | CQYVLVQDYC GSNPGTFRIL VGNKGCSHPS VKCKKRVTIL VEGGEIELFD |
| 1901 | GEVNVKRPMK DETHFEVVES GRYIILLLGK ALSVVWDRHL SISVVLKQTY |
| 1951 | QEKVCGLCGN FDGIQNNDLT SSNLQVEEDP VDFGNSWKVS SQCADTRKVP |
| 2001 | LDSSPATCHN NIMKQTMVDS SCRILTSDVF QDCNKLVDPE PYLDVCIYDT |
| 2051 | CSCESIGDCA AFCDTIAAYA HVCAQHGKVV TWRTATLCPQ SCEERNLREN |
| 2101 | GYEAEWRYNS CAPACQVTCQ HPEPLACPVQ CVEGCHAHCP PGKILDELLQ |
| 2151 | TCVDPEDCPV CEVAGRRFAS GKKVTLNPSD PEHCQICHCD VVNLTCEACQ |
| 2201 | EPISGTSESA TPESGPGSEP ATSGSETPGT SESATPESGP GSEPATSGSE |
| 2251 | TPGTSESATP ESGPGTSTEP SEGSAPGSPA GSPTSTEEGT SESATPESGP |
| 2301 | GSEPATSGSE TPGTSESATP ESGPGSPAGS PTSTEEGSPA GSPTSTEEGT |
| 2351 | STEPSEGSAP GTSESATPES GPGTSESATP ESGPGTSESA TPESGPGSEP |
| 2401 | ATSGSETPGS EPATSGSETP GSPAGSPTST EEGTSTEPSE GSAPGTSTEP |
| 2451 | SEGSAPGSEP ATSGSETPGT SESATPESGP GTSTEPSEGS APDSGGGGSG |
| 2501 | GGGSGGGGSG GGGSGGGGSL VPRGSGGDKT HTCPPCPAPE LLGGPSVFLF |
| 2551 | PPKPKDTLMI SRTPEVTCVV VDVSHEDPEV KFNWYVDGVE VHNAKTKPRE |
| 2601 | EQYNSTYRVV SVLTVLHQDW LNGKEYKCKV SNKALPAPIE KTISKAKGQP |
| 2651 | REPQVYTLPP SRDELTKNQV SLTCLVKGFY PSDIAVEWES NGQPENNYKT |
| 2701 | TPPVLDSDGS FFLYSKLTVD KSRWQQGNVF SCSVMHEALH NHYTQKSLSL |
| 2751 | SPGK |

pSYN-FVIII-170 Protein Sequence (SEQ ID NO: 71)

| | |
|---|---|
| 1 | SLSCRPPMVK LVCPADNLRA EGLECTKTCQ NYDLECMSMG CVSGCLCPPG |
| 51 | MVRHENRCVA LERCPCFHQG KEYAPGETVK IGCNTCVCRD RKWNCTDHVC |
| 101 | DATCSTIGMA HYLTFDGLKY LFPGECQYVL VQDYCGSNPG TFRILVGNKG |
| 151 | CSHPSVKCKK RVTILVEGGE IELFDGEVNV KRPMKDETHF EVVESGRYII |
| 201 | LLLGKALSVV WDRHLSISVV LKQTYQEKVC GLCGNFDGIQ NNDLTSSNLQ |
| 251 | VEEDPVDFGN SWKVSSQCAD TRKVPLDSSP ATCHNNIMKQ TMVDSSCRIL |
| 301 | TSDVFQDCNK LVDPEPYLDV CIYDTCSCES IGDCAAFCDT IAAYAHVCAQ |
| 351 | HGKVVTWRTA TLCPQSCEER NLRENGYEAE WRYNSCAPAC QVTCQHPEPL |
| 401 | ACPVQCVEGC HAHCPPGKIL DELLQTCVDP EDCPVCEVAG RRFASGKKVT |
| 451 | LNPSDPEHCQ ICHCDVVNLT CEACQEPISG TSESATPESG PGSEPATSGS |
| 501 | ETPGTSESAT PESGPGSEPA TSGSETPGTS ESATPESGPG TSTEPSEGSA |
| 551 | PGSPAGSPTS TEEGTSESAT PESGPGSEPA TSGSETPGTS ESATPESGPG |
| 601 | SPAGSPTSTE EGSPAGSPTS TEEGTSTEPS EGSAPGTSES ATPESGPGTS |
| 651 | ESATPESGPG TSESATPESG PGSEPATSGS ETPGSEPATS GSETPGSPAG |
| 701 | SPTSTEEGTS TEPSEGSAPG TSTEPSEGSA PGSEPATSGS ETPGTSESAT |
| 751 | PESGPGTSTE PSEGSAPDSG GGGSGGGGSG GGGSGGGGSG GGGSLVPRGS |
| 801 | GGASATRRYY LGAVELSWDY MQSDLGELPV DARFPPRVPK SFPFNTSVVY |
| 851 | KKTLFVEFTD HLFNIAKPRP PWMGLLGPTI QAEVYDTVVI TLKNMASHPV |
| 901 | SLHAVGVSYW KASEGAEYDD QTSQREKEDD KVFPGGSHTY VWQVLKENGP |
| 951 | MASDPLCLTY SYLSHVDLVK DLNSGLIGAL LVCREGSLAK EKTQTLHKFI |
| 1001 | LLFAVFDEGK SWHSETKNSL MQDRDAASAR AWPKMHTVNG YVNRSLPGLI |
| 1051 | GCHRKSVYWH VIGMGTTPEV HSIFLEGHTF LVRNHRQASL EISPITFLTA |
| 1101 | QTLLMDLGQF LLFCHISSHQ HDGMEAYVKV DSCPEEPQLR MKNNEEAEDY |
| 1151 | DDDLTDSEMD VVRFDDDNSP SFIQIRSVAK KHPKTWVHYI AAEEEDWDYA |
| 1201 | PLVLAPDDRS YKSQYLNNGP QRIGRKYKKV RFMAYTDETF KTREAIQHES |
| 1251 | GILGPLLYGE VGDTLLIIFK NQASRPYNIY PHGITDVRPL YSRRLPKGVK |
| 1301 | HLKDFPILPG EIFKYKWTVT VEDGPTKSDP RCLTRYYSSF VNMERDLASG |
| 1351 | LIGPLLICYK ESVDQRGNQI MSDKRNVILF SVFDENRSWY LTENIQRFLP |
| 1401 | NPAGVQLEDP EFQASNIMHS INGYVFDSLQ LSVCLHEVAY WYILSIGAQT |
| 1451 | DFLSVFFSGY TFKHKMVYED TLTLFPFSGE TVFMSMENPG LWILGCHNSD |
| 1501 | FRNRGMTALL KVSSCDKNTG DYYEDSYEDI SAYLLSKNNA IEPRSFSQNP |
| 1551 | PVLKRHQREI TRTTLQSDQE EIDYDDTISV EMKKEDFDIY DEDENQSPRS |
| 1601 | FQKKTRHYFI AAVERLWDYG MSSSPHVLRN RAQSGSVPQF KKVVFQEFTD |
| 1651 | GSFTQPLYRG ELNEHLGLLG PYIRAEVEDN IMVTFRNQAS RPYSFYSSLI |
| 1701 | SYEEDQRQGA EPRKNFVKPN ETKTYFWKVQ HHMAPTKDEF DCKAWAYFSD |
| 1751 | VDLEKDVHSG LIGPLLVCHT NTLNPAHGRQ VTVQEFALFF TIFDETKSWY |
| 1801 | FTENMERNCR APCNIQMEDP TFKENYRFHA INGYIMDTLP GLVMAQDQRI |
| 1851 | RWYLLSMGSN ENIHSIHFSG HVFTVRKKEE YKMALYNLYP GVFETVEMLP |
| 1901 | SKAGIWRVEC LIGEHLHAGM STLFLVYSNK CQTPLGMASG HIRDFQITAS |
| 1951 | GQYGQWAPKL ARLHYSGSIN AWSTKEPFSW IKVDLLAPMI IHGIKTQGAR |
| 2001 | QKFSSLYISQ FIIMYSLDGK KWQTYRGNST GTLMVFFGNV DSSGIKHNIF |
| 2051 | NPPIIARYIR LHPTHYSIRS TLRMELMGCD LNSCSMPLGM ESKAISDAQI |
| 2101 | TASSYFTNMF ATWSPSKARL HLQGRSNAWR PQVNNPKEWL QVDFQKTMKV |
| 2151 | TGVTTQGVKS LLTSMYVKEF LISSSQDGHQ WTLFFQNGKV KVFQGNQDSF |
| 2201 | TPVVNSLDPP LLTRYLRIHP QSWVHQIALR MEVLGCEAQD LY |

pSYN FVIII 310 Nucleotide Sequence (Encoding FVIII with Complete B-Domain Deletion Except 2 Amino Acid Residues and 288 AE-XTEN Inserted after aa 742) (SEQ ID NO:170)

| | |
|---|---|
| 1 | ATGCAAATAG AGCTCTCCAC CTGCTTCTTT CTGTGCCTTT TGCGATTCTG |
| 51 | CTTTAGTGCC ACCAGAAGAT ACTACCTGGG TGCAGTGGAA CTGTCATGGG |
| 101 | ACTATATGCA AAGTGATCTC GGTGAGCTGC CTGTGGACGC AAGATTTCCT |
| 151 | CCTAGAGTGC CAAAATCTTT TCCATTCAAC ACCTCAGTCG TGTACAAAAA |
| 201 | GACTCTGTTT GTAGAATTCA CGGATCACCT TTTCAACATC GCTAAGCCAA |
| 251 | GGCCACCCTG GATGGGTCTG CTAGGTCCTA CCATCCAGGC TGAGGTTTAT |
| 301 | GATACAGTGG TCATTACACT TAAGAACATG GCTTCCCATC CTGTCAGTCT |
| 351 | TCATGCTGTT GGTGTATCCT ACTGGAAAGC TTCTGAGGGA GCTGAATATG |
| 401 | ATGATCAGAC CAGTCAAAGG GAGAAAGAAG ATGATAAAGT CTTCCCTGGT |
| 451 | GGAAGCCATA CATATGTCTG GCAGGTCCTG AAAGAGAATG GTCCAATGGC |
| 501 | CTCTGACCCA CTGTGCCTTA CCTACTCATA TCTTTCTCAT GTGGACCTGG |
| 551 | TAAAAGACTT GAATTCAGGC CTCATTGGAG CCCTACTAGT ATGTAGAGAA |
| 601 | GGGAGTCTGG CCAAGGAAAA GACACAGACC TTGCACAAAT TTATACTACT |
| 651 | TTTTGCTGTA TTTGATGAAG GGAAAAGTTG GCACTCAGAA ACAAAGAACT |
| 701 | CCTTGATGCA GGATAGGGAT GCTGCATCTG CTCGGGCCTG GCCTAAAATG |
| 751 | CACACAGTCA ATGGTTATGT AAACAGGTCT CTGCCAGGTC TGATTGGATG |
| 801 | CCACAGGAAA TCAGTCTATT GGCATGTGAT TGGAATGGGC ACCACTCCTG |
| 851 | AAGTGCACTC AATATTCCTC GAAGGTCACA CATTTCTTGT GAGGAACCAT |
| 901 | CGCCAGGCGT CCTTGGAAAT CTCGCCAATA ACTTTCCTTA CTGCTCAAAC |
| 951 | ACTCTTGATG GACCTTGGAC AGTTTCTACT GTTTTGTCAT ATCTCTTCCC |
| 1001 | ACCAACATGA TGGCATGGAA GCTTATGTCA AAGTAGACAG CTGTCCAGAG |
| 1051 | GAACCCCAAC TACGAATGAA AAATAATGAA GAAGCGGAAG ACTATGATGA |
| 1101 | TGATCTTACT GATTCTGAAA TGGATGTGGT CAGGTTTGAT GATGACAACT |
| 1151 | CTCCTTCCTT TATCCAAATT CGCTCAGTTG CCAAGAAGCA TCCTAAAACT |
| 1201 | TGGGTACATT ACATTGCTGC TGAAGAGGAG GACTGGGACT ATGCTCCCTT |
| 1251 | AGTCCTCGCC CCCGATGACA GAAGTTATAA AAGTCAATAT TTGAACAATG |
| 1301 | GCCCTCAGCG GATTGGTAGG AAGTACAAAA AAGTCCGATT TATGGCATAC |
| 1351 | ACAGATGAAA CCTTTAAGAC TCGTGAAGCT ATTCAGCATG AATCAGGAAT |
| 1401 | CTTGGGACCT TTACTTTATG GGGAAGTTGG AGACACACTG TTGATTATAT |
| 1451 | TTAAGAATCA AGCAAGCAGA CCATATAACA TCTACCCTCA CGGAATCACT |
| 1501 | GATGTCCGTC CTTTGTATTC AAGGAGATTA CCAAAAGGTG TAAAACATTT |
| 1551 | GAAGGATTTT CCAATTCTGC CAGGAGAAAT ATTCAAATAT AAATGGACAG |
| 1601 | TGACTGTAGA AGATGGGCCA ACTAAATCAG ATCCTCGGTG CCTGACCCGC |
| 1651 | TATTACTCTA GTTTCGTTAA TATGGAGAGA GATCTAGCTT CAGGACTCAT |
| 1701 | TGGCCCTCTC CTCATCTGCT ACAAAGAATC TGTAGATCAA AGAGGAAACC |
| 1751 | AGATAATGTC AGACAAGAGG AATGTCATCC TGTTTTCTGT ATTTGATGAG |
| 1801 | AACCGAAGCT GGTACCTCAC AGAGAATATA CAACGCTTTC TCCCCAATCC |
| 1851 | AGCTGGAGTG CAGCTTGAGG ATCCAGAGTT CCAAGCCTCC AACATCATGC |
| 1901 | ACAGCATCAA TGGCTATGTT TTTGATAGTT TGCAGTTGTC AGTTTGTTTG |
| 1951 | CATGAGGTGG CATACTGGTA CATTCTAAGC ATTGGAGCAC AGACTGACTT |
| 2001 | CCTTTCTGTC TTCTTCTCTG GATATACCTT CAAACACAAA ATGGTCTATG |
| 2051 | AAGACACACT CACCCTATTC CCATTCTCAG GAGAAACTGT CTTCATGTCG |
| 2101 | ATGGAAAACC CAGGTCTATG GATTCTGGGG TGCCACAACT CAGACTTTCG |
| 2151 | GAACAGAGGC ATGACCGCCT TACTGAAGGT TTCTAGTTGT GACAAGAACA |
| 2201 | CTGGTGATTA TTACGAGGAC AGTTATGAAG ATATTTCAGC ATACTTGCTG |
| 2251 | AGTAAAAACA ATGCCATTGA ACCAAGAAGC TTCGGTACCT CAGAGTCTGC |
| 2301 | TACCCCCGAG TCAGGGCCAG GATCAGAGCC AGCCACCTCC GGGTCTGAGA |
| 2351 | CACCCGGGAC TTCCGAGAGT GCCACCCCTG AGTCCGGACC CGGGTCCGAG |
| 2401 | CCCGCCACTT CCGGCTCCGA AACTCCCGGC ACAAGCGAGA GCGCTACCCC |
| 2451 | AGAGTCAGGA CCAGGAACAT CTACAGAGCC CTCTGAAGGC TCCGCTCCAG |
| 2501 | GGTCCCCAGC CGGCAGTCCC ACTAGCACCG AGGAGGGAAC CTCTGAAAGC |
| 2551 | GCCACACCCG AATCAGGGCC AGGGTCTGAG CCTGCTACCA GCGGCAGCGA |
| 2601 | GACACCAGGC ACCTCTGAGT CCGCCACACC AGAGTCCGGA CCCGGATCTC |
| 2651 | CCGCTGGGAG CCCCACCTCC ACTGAGGAGG GATCTCCTGC TGGCTCTCCA |
| 2701 | ACATCTACTG AGGAAGGTAC CTCAACCGAG CCATCCGAGG GATCAGCTCC |
| 2751 | CGGCACCTCA GAGTCGGCAA CCCCGGAGTC TGGACCCGGA ACTTCCGAAA |
| 2801 | GTGCCACACC AGAGTCCGGT CCCGGGACTT CAGAATCAGC AACACCCGAG |
| 2851 | TCCGGCCCTG GGTCTGAACC CGCCACAAGT GGTAGTGAGA CACCAGGATC |
| 2901 | AGAACCTGCT ACCTCAGGGT CAGAGACACC CGGATCTCCG GCAGGCTCAC |
| 2951 | CAACCTCCAC TGAGGAGGGC ACCAGCACAG AACCAAGCGA GGGCTCCGCA |
| 3001 | CCCGGAACAA GCACTGAACC CAGTGAGGGT TCAGCACCCG GCTCTGAGCC |
| 3051 | GGCCACAAGT GGCAGTGAGA CACCCGGCAC TTCAGAGAGT GCCACCCCCG |
| 3101 | AGAGTGGCCC AGGCACTAGT ACCGAGCCCT CTGAAGGCAG TGCGCCAGCC |
| 3151 | TCGAGCGAAA TAACTCGTAC TACTCTTCAG TCAGATCAAG AGGAAATCGA |
| 3201 | TTATGATGAT ACCATATCAG TTGAAATGAA GAAGGAAGAT TTTGACATTT |
| 3251 | ATGATGAGGA TGAAAATCAG AGCCCCCGCA GCTTTCAAAA GAAAACACGA |
| 3301 | CACTATTTTA TTGCTGCAGT GGAGAGGCTC TGGGATTATG GGATGAGTAG |
| 3351 | CTCCCCACAT GTTCTAAGAA ACAGGGCTCA GAGTGGCAGT GTCCCTCAGT |
| 3401 | TCAAGAAAGT TGTTTTCCAG GAATTTACTG ATGGCTCCTT TACTCAGCCC |
| 3451 | TTATACCGTG GAGAACTAAA TGAACATTTG GGACTCCTGG GGCCATATAT |
| 3501 | AAGAGCAGAA GTTGAAGATA ATATCATGGT AACTTTCAGA AATCAGGCCT |
| 3551 | CTCGTCCCTA TTCCTTCTAT TCTAGCCTTA TTTCTTATGA GGAAGATCAG |
| 3601 | AGGCAAGGAG CAGAACCTAG AAAAAACTTT GTCAAGCCTA ATGAAACCAA |
| 3651 | AACTTACTTT TGGAAAGTGC AACATCATAT GGCACCCACT AAAGATGAGT |
| 3701 | TTGACTGCAA AGCCTGGGCT TATTTCTCTG ATGTTGACCT GGAAAAAGAT |
| 3751 | GTGCACTCAG GCCTGATTGG ACCCCTTCTG GTCTGCCACA CTAACACACT |
| 3801 | GAACCCTGCT CATGGGAGAC AAGTGACAGT ACAGGAATTT GCTCTGTTTT |
| 3851 | TCACCATCTT TGATGAGACC AAAAGCTGGT ACTTCACTGA AAATATGGAA |
| 3901 | AGAAACTGCA GGGCTCCCTG CAATATCCAG ATGGAAGATC CCACTTTTAA |
| 3951 | AGAGAATTAT CGCTTCCATG CAATCAATGG CTACATAATG GATACACTAC |
| 4001 | CTGGCTTAGT AATGGCTCAG GATCAAAGGA TTCGATGGTA TCTGCTCAGC |
| 4051 | ATGGGCAGCA ATGAAAACAT CCATTCTATT CATTTCAGTG GACATGTGTT |
| 4101 | CACTGTACGA AAAAAAGAGG AGTATAAAAT GGCACTGTAC AATCTCTATC |
| 4151 | CAGGTGTTTT TGAGACAGTG GAAATGTTAC CATCCAAAGC TGGAATTTGG |
| 4201 | CGGGTGGAAT GCCTTATTGG CGAGCATCTA CATGCTGGGA TGAGCACACT |
| 4251 | TTTTCTGGTG TACAGCAATA AGTGTCAGAC TCCCCTGGGA ATGGCTTCTG |
| 4301 | GACACATTAG AGATTTTCAG ATTACAGCTT CAGGACAATA TGGACAGTGG |
| 4351 | GCCCCAAAGC TGGCCAGACT TCATTATTCC GGATCAATCA ATGCCTGGAG |
| 4401 | CACCAAGGAG CCCTTTTCTT GGATCAAGGT GGATCTGTTG GCACCAATGA |
| 4451 | TTATTCACGG CATCAAGACC CAGGGTGCCC GTCAGAAGTT CTCCAGCCTC |
| 4501 | TACATCTCTC AGTTTATCAT CATGTATAGT CTTGATGGGA AGAAGTGGCA |
| 4551 | GACTTATCGA GGAAATTCCA CTGGAACCTT AATGGTCTTC TTTGGCAATG |
| 4601 | TGGATTCATC TGGGATAAAA CACAATATTT TTAACCCTCC AATTATTGCT |
| 4651 | CGATACATCC GTTTGCACCC AACTCATTAT AGCATTCGCA GCACTCTTCG |
| 4701 | CATGGAGTTG ATGGGCTGTG ATTTAAATAG TTGCAGCATG CCATTGGGAA |
| 4751 | TGGAGAGTAA AGCAATATCA GATGCACAGA TTACTGCTTC ATCCTACTTT |
| 4801 | ACCAATATGT TTGCCACCTG GTCTCCTTCA AAAGCTCGAC TTCACCTCCA |
| 4851 | AGGGAGGAGT AATGCCTGGA GACCTCAGGT GAATAATCCA AAAGAGTGGC |
| 4901 | TGCAAGTGGA CTTCCAGAAG ACAATGAAAG TCACAGGAGT AACTACTCAG |
| 4951 | GGAGTAAAAT CTCTGCTTAC CAGCATGTAT GTGAAGGAGT TCCTCATCTC |
| 5001 | CAGCAGTCAA GATGGCCATC AGTGGACTCT CTTTTTTCAG AATGGCAAAG |
| 5051 | TAAAGGTTTT TCAGGGAAAT CAAGACTCCT TCACACCTGT GGTGAACTCT |
| 5101 | CTAGACCCAC CGTTACTGAC TCGCTACCTT CGAATTCACC CCCAGAGTTG |
| 5151 | GGTGCACCAG ATTGCCCTGA GGATGGAGGT TCTGGGCTGC GAGGCACAGG |
| 5201 | ACCTCTACGA CAAAACTCAC ACATGCCCAC CGTGCCCAGC TCCAGAACTC |
| 5251 | CTGGGCGGAC CGTCAGTCTT CCTCTTCCCC CCAAAACCCA AGGACACCCT |
| 5301 | CATGATCTCC CGGACCCCTG AGGTCACATG CGTGGTGGTG GACGTGAGCC |
| 5351 | ACGAAGACCC TGAGGTCAAG TTCAACTGGT ACGTGGACGG CGTGGAGGTG |
| 5401 | CATAATGCCA AGACAAAGCC GCGGGAGGAG CAGTACAACA GCACGTACCG |
| 5451 | TGTGGTCAGC GTCCTCACCG TCCTGCACCA GGACTGGCTG AATGGCAAGG |
| 5501 | AGTACAAGTG CAAGGTCTCC AACAAAGCCC TCCCAGCCCC CATCGAGAAA |
| 5551 | ACCATCTCCA AAGCCAAAGG GCAGCCCCGA GAACCACAGG TGTACACCCT |
| 5601 | GCCCCCATCC CGGGATGAGC TGACCAAGAA CCAGGTCAGC CTGACCTGCC |
| 5651 | TGGTCAAAGG CTTCTATCCC AGCGACATCG CCGTGGAGTG GGAGAGCAAT |
| 5701 | GGGCAGCCGG AGAACAACTA CAAGACCACG CCTCCCGTGT TGGACTCCGA |
| 5751 | CGGCTCCTTC TTCCTCTACA GCAAGCTCAC CGTGGACAAG AGCAGGTGGC |
| 5801 | AGCAGGGGAA CGTCTTCTCA TGCTCCGTGA TGCATGAGGC TCTGCACAAC |
| 5851 | CACTACACGC AGAAGAGCCT CTCCCTGTCT CCGGGTAAAT GA |

pSYN FVIII 310 Protein Sequence (FVIII with Complete B-Domain Deletion Except 2 Amino Acid Residues and 288 AE-XTEN Inserted after aa 742) (SEQ ID NO:171)

| | |
|---|---|
| 1 | ATRRYYLGAV ELSWDYMQSD LGELPVDARF PPRVPKSFPF NTSVVYKKTL |
| 51 | FVEFTDHLFN IAKPRPPWMG LLGPTIQAEV YDTVVITLKN MASHPVSLHA |
| 101 | VGVSYWKASE GAEYDDQTSQ REKEDDKVFP GGSHTYVWQV LKENGPMASD |
| 151 | PLCLTYSYLS HVDLVKDLNS GLIGALLVCR EGSLAKEKTQ TLHKFILLFA |
| 201 | VFDEGKSWHS ETKNSLMQDR DAASARAWPK MHTVNGYVNR SLPGLIGCHR |
| 251 | KSVYWHVIGM GTTPEVHSIF LEGHTFLVRN HRQASLEISP ITFLTAQTLL |
| 301 | MDLGQFLLFC HISSHQHDGM EAYVKVDSCP EEPQLRMKNN EEAEDYDDDL |
| 351 | TDSEMDVVRF DDDNSPSFIQ IRSVAKKHPK TWVHYIAAEE EDWDYAPLVL |
| 401 | APDDRSYKSQ YLNNGPQRIG RKYKKVRFMA YTDETFKTRE AIQHESGILG |
| 451 | PLLYGEVGDT LLIIFKNQAS RPYNIYPHGI TDVRPLYSRR LPKGVKHLKD |
| 501 | FPILPGEIFK YKWTVTVEDG PTKSDPRCLT RYYSSFVNME RDLASGLIGP |
| 551 | LLICYKESVD QRGNQIMSDK RNVILFSVFD ENRSWYLTEN IQRFLPNPAG |
| 601 | VQLEDPEFQA SNIMHSINGY VFDSLQLSVC LHEVAYWYIL SIGAQTDFLS |
| 651 | VFFSGYTFKH KMVYEDTLTL FPFSGETVFM SMENPGLWIL GCHNSDFRNR |
| 701 | GMTALLKVSS CDKNTGDYYE DSYEDISAYL LSKNNAIEPR SFGTSESATP |
| 751 | ESGPGSEPAT SGSETPGTSE SATPESGPGS EPATSGSETP GTSESATPES |
| 801 | GPGTSTEPSE GSAPGSPAGS PTSTEEGTSE SATPESGPGS EPATSGSETP |
| 851 | GTSESATPES GPGSPAGSPT STEEGSPAGS PTSTEEGTST EPSEGSAPGT |
| 901 | SESATPESGP GTSESATPES GPGTSESATP ESGPGSEPAT SGSETPGSEP |
| 951 | ATSGSETPGS PAGSPTSTEE GTSTEPSEGS APGTSTEPSE GSAPGSEPAT |
| 1001 | SGSETPGTSE SATPESGPGT STEPSEGSAP ASSEITRTTL QSDQEEIDYD |
| 1051 | DTISVEMKKE DFDIYDEDEN QSPRSFQKKT RHYFIAAVER LWDYGMSSSP |
| 1101 | HVLRNRAQSG SVPQFKKVVF QEFTDGSFTQ PLYRGELNEH LGLLGPYIRA |
| 1151 | EVEDNIMVTF RNQASRPYSF YSSLISYEED QRQGAEPRKN FVKPNETKTY |
| 1201 | FWKVQHHMAP TKDEFDCKAW AYFSDVDLEK DVHSGLIGPL LVCHTNTLNP |
| 1251 | AHGRQVTVQE FALFFTIFDE TKSWYFTENM ERNCRAPCNI QMEDPTFKEN |
| 1301 | YRFHAINGYI MDTLPGLVMA QDQRIRWYLL SMGSNENIHS IHFSGHVFTV |
| 1351 | RKKEEYKMAL YNLYPGVFET VEMLPSKAGI WRVECLIGEH LHAGMSTLFL |
| 1401 | VYSNKCQTPL GMASGHIRDF QITASGQYGQ WAPKLARLHY SGSINAWSTK |
| 1451 | EPFSWIKVDL LAPMIIHGIK TQGARQKFSS LYISQFIIMY SLDGKKWQTY |
| 1501 | RGNSTGTLMV FFGNVDSSGI KHNIFNPPII ARYIRLHPTH YSIRSTLRME |
| 1551 | LMGCDLNSCS MPLGMESKAI SDAQITASSY FTNMFATWSP SKARLHLQGR |
| 1601 | SNAWRPQVNN PKEWLQVDFQ KTMKVTGVTT QGVKSLLTSM YVKEFLISSS |
| 1651 | QDGHQWTLFF QNGKVKVFQG NQDSFTPVVN SLDPPLLTRY LRIHPQSWVH |
| 1701 | QIALRMEVLG CEAQDLYDKT HTCPPCPAPE LLGGPSVFLF PPKPKDTLMI |
| 1751 | SRTPEVTCVV VDVSHEDPEV KFNWYVDGVE VHNAKTKPRE EQYNSTYRVV |
| 1801 | SVLTVLHQDW LNGKEYKCKV SNKALPAPIE KTISKAKGQP REPQVYTLPP |
| 1851 | SRDELTKNQV SLTCLVKGFY PSDIAVEWES NGQPENNYKT TPPVLDSDGS |
| 1901 | FFLYSKLTVD KSRWQQGNVF SCSVMHEALH NHYTQKSLSL SPGK* |

pSYN FVIII 312 Nucleotide Sequence (Encoding FVIII with Complete B-Domain Deletion Except 5 Amino Acid Residues and 288 AE-XTEN Inserted after aa 745-B5 Version) (SEQ ID NO:172)

| | |
|---|---|
| 1 | ATGCAAATAG AGCTCTCCAC CTGCTTCTTT CTGTGCCTTT TGCGATTCTG |
| 51 | CTTTAGTGCC ACCAGAAGAT ACTACCTGGG TGCAGTGGAA CTGTCATGGG |
| 101 | ACTATATGCA AAGTGATCTC GGTGAGCTGC CTGTGGACGC AAGATTTCCT |
| 151 | CCTAGAGTGC CAAAATCTTT TCCATTCAAC ACCTCAGTCG TGTACAAAAA |
| 201 | GACTCTGTTT GTAGAATTCA CGGATCACCT TTTCAACATC GCTAAGCCAA |
| 251 | GGCCACCCTG GATGGGTCTG CTAGGTCCTA CCATCCAGGC TGAGGTTTAT |
| 301 | GATACAGTGG TCATTACACT TAAGAACATG GCTTCCCATC CTGTCAGTCT |
| 351 | TCATGCTGTT GGTGTATCCT ACTGGAAAGC TTCTGAGGGA GCTGAATATG |
| 401 | ATGATCAGAC CAGTCAAAGG GAGAAAGAAG ATGATAAAGT CTTCCCTGGT |
| 451 | GGAAGCCATA CATATGTCTG GCAGGTCCTG AAAGAGAATG GTCCAATGGC |
| 501 | CTCTGACCCA CTGTGCCTTA CCTACTCATA TCTTTCTCAT GTGGACCTGG |
| 551 | TAAAAGACTT GAATTCAGGC CTCATTGGAG CCCTACTAGT ATGTAGAGAA |
| 601 | GGGAGTCTGG CCAAGGAAAA GACACAGACC TTGCACAAAT TTATACTACT |
| 651 | TTTTGCTGTA TTTGATGAAG GGAAAAGTTG GCACTCAGAA ACAAAGAACT |
| 701 | CCTTGATGCA GGATAGGGAT GCTGCATCTG CTCGGGCCTG GCCTAAAATG |
| 751 | CACACAGTCA ATGGTTATGT AAACAGGTCT CTGCCAGGTC TGATTGGATG |
| 801 | CCACAGGAAA TCAGTCTATT GGCATGTGAT TGGAATGGGC ACCACTCCTG |
| 851 | AAGTGCACTC AATATTCCTC GAAGGTCACA CATTTCTTGT GAGGAACCAT |
| 901 | CGCCAGGCGT CCTTGGAAAT CTCGCCAATA ACTTTCCTTA CTGCTCAAAC |
| 951 | ACTCTTGATG GACCTTGGAC AGTTTCTACT GTTTTGTCAT ATCTCTTCCC |
| 1001 | ACCAACATGA TGGCATGGAA GCTTATGTCA AAGTAGACAG CTGTCCAGAG |
| 1051 | GAACCCCAAC TACGAATGAA AAATAATGAA GAAGCGGAAG ACTATGATGA |
| 1101 | TGATCTTACT GATTCTGAAA TGGATGTGGT CAGGTTTGAT GATGACAACT |
| 1151 | CTCCTTCCTT TATCCAAATT CGCTCAGTTG CCAAGAAGCA TCCTAAAACT |
| 1201 | TGGGTACATT ACATTGCTGC TGAAGAGGAG GACTGGGACT ATGCTCCCTT |
| 1251 | AGTCCTCGCC CCCGATGACA GAAGTTATAA AAGTCAATAT TTGAACAATG |
| 1301 | GCCCTCAGCG GATTGGTAGG AAGTACAAAA AAGTCCGATT TATGGCATAC |
| 1351 | ACAGATGAAA CCTTTAAGAC TCGTGAAGCT ATTCAGCATG AATCAGGAAT |
| 1401 | CTTGGGACCT TTACTTTATG GGGAAGTTGG AGACACACTG TTGATTATAT |
| 1451 | TTAAGAATCA AGCAAGCAGA CCATATAACA TCTACCCTCA CGGAATCACT |
| 1501 | GATGTCCGTC CTTTGTATTC AAGGAGATTA CCAAAAGGTG TAAAACATTT |
| 1551 | GAAGGATTTT CCAATTCTGC CAGGAGAAAT ATTCAAATAT AAATGGACAG |
| 1601 | TGACTGTAGA AGATGGGCCA ACTAAATCAG ATCCTCGGTG CCTGACCCGC |
| 1651 | TATTACTCTA GTTTCGTTAA TATGGAGAGA GATCTAGCTT CAGGACTCAT |
| 1701 | TGGCCCTCTC CTCATCTGCT ACAAAGAATC TGTAGATCAA AGAGGAAACC |
| 1751 | AGATAATGTC AGACAAGAGG AATGTCATCC TGTTTTCTGT ATTTGATGAG |
| 1801 | AACCGAAGCT GGTACCTCAC AGAGAATATA CAACGCTTTC TCCCCAATCC |
| 1851 | AGCTGGAGTG CAGCTTGAGG ATCCAGAGTT CCAAGCCTCC AACATCATGC |
| 1901 | ACAGCATCAA TGGCTATGTT TTTGATAGTT TGCAGTTGTC AGTTTGTTTG |
| 1951 | CATGAGGTGG CATACTGGTA CATTCTAAGC ATTGGAGCAC AGACTGACTT |
| 2001 | CCTTTCTGTC TTCTTCTCTG GATATACCTT CAAACACAAA ATGGTCTATG |
| 2051 | AAGACACACT CACCCTATTC CCATTCTCAG GAGAAACTGT CTTCATGTCG |
| 2101 | ATGGAAAACC CAGGTCTATG GATTCTGGGG TGCCACAACT CAGACTTTCG |
| 2151 | GAACAGAGGC ATGACCGCCT TACTGAAGGT TTCTAGTTGT GACAAGAACA |
| 2201 | CTGGTGATTA TTACGAGGAC AGTTATGAAG ATATTTCAGC ATACTTGCTG |
| 2251 | AGTAAAAACA ATGCCATTGA ACCAAGAAGC TTCTCTCAAA ACGGTACCTC |
| 2301 | AGAGTCTGCT ACCCCCGAGT CAGGGCCAGG ATCAGAGCCA GCCACCTCCG |
| 2351 | GGTCTGAGAC ACCCGGGACT TCCGAGAGTG CCACCCCTGA GTCCGGACCC |
| 2401 | GGGTCCGAGC CCGCCACTTC CGGCTCCGAA ACTCCCGGCA CAAGCGAGAG |
| 2451 | CGCTACCCCA GAGTCAGGAC CAGGAACATC TACAGAGCCC TCTGAAGGCT |
| 2501 | CCGCTCCAGG GTCCCCAGCC GGCAGTCCCA CTAGCACCGA GGAGGGAACC |
| 2551 | TCTGAAAGCG CCACACCCGA ATCAGGGCCA GGGTCTGAGC CTGCTACCAG |
| 2601 | CGGCAGCGAG ACACCAGGCA CCTCTGAGTC CGCCACACCA GAGTCCGGAC |
| 2651 | CCGGATCTCC CGCTGGGAGC CCCACCTCCA CTGAGGAGGG ATCTCCTGCT |
| 2701 | GGCTCTCCAA CATCTACTGA GGAAGGTACC TCAACCGAGC CATCCGAGGG |
| 2751 | ATCAGCTCCC GGCACCTCAG AGTCGGCAAC CCCGGAGTCT GGACCCGGAA |
| 2801 | CTTCCGAAAG TGCCACACCA GAGTCCGGTC CCGGGACTTC AGAATCAGCA |
| 2851 | ACACCCGAGT CCGGCCCTGG GTCTGAACCC GCCACAAGTG GTAGTGAGAC |
| 2901 | ACCAGGATCA GAACCTGCTA CCTCAGGGTC AGAGACACCC GGATCTCCGG |
| 2951 | CAGGCTCACC AACCTCCACT GAGGAGGGCA CCAGCACAGA ACCAAGCGAG |
| 3001 | GGCTCCGCAC CCGGAACAAG CACTGAACCC AGTGAGGGTT CAGCACCCGG |
| 3051 | CTCTGAGCCG GCCACAAGTG GCAGTGAGAC ACCCGGCACT TCAGAGAGTG |
| 3101 | CCACCCCCGA GAGTGGCCCA GGCACTAGTA CCGAGCCCTC TGAAGGCAGT |
| 3151 | GCGCCAGCCT CGAGCGAAAT AACTCGTACT ACTCTTCAGT CAGATCAAGA |
| 3201 | GGAAATCGAT TATGATGATA CCATATCAGT TGAAATGAAG AAGGAAGATT |
| 3251 | TTGACATTTA TGATGAGGAT GAAAATCAGA GCCCCCGCAG CTTTCAAAAG |
| 3301 | AAAACACGAC ACTATTTTAT TGCTGCAGTG GAGAGGCTCT GGGATTATGG |
| 3351 | GATGAGTAGC TCCCCACATG TTCTAAGAAA CAGGGCTCAG AGTGGCAGTG |
| 3401 | TCCCTCAGTT CAAGAAAGTT GTTTTCCAGG AATTTACTGA TGGCTCCTTT |
| 3451 | ACTCAGCCCT TATACCGTGG AGAACTAAAT GAACATTTGG GACTCCTGGG |
| 3501 | GCCATATATA AGAGCAGAAG TTGAAGATAA TATCATGGTA ACTTTCAGAA |
| 3551 | ATCAGGCCTC TCGTCCCTAT TCCTTCTATT CTAGCCTTAT TTCTTATGAG |
| 3601 | GAAGATCAGA GGCAAGGAGC AGAACCTAGA AAAAACTTTG TCAAGCCTAA |
| 3651 | TGAAACCAAA ACTTACTTTT GGAAAGTGCA ACATCATATG GCACCCACTA |
| 3701 | AAGATGAGTT TGACTGCAAA GCCTGGGCTT ATTTCTCTGA TGTTGACCTG |
| 3751 | GAAAAAGATG TGCACTCAGG CCTGATTGGA CCCCTTCTGG TCTGCCACAC |
| 3801 | TAACACACTG AACCCTGCTC ATGGGAGACA AGTGACAGTA CAGGAATTTG |
| 3851 | CTCTGTTTTT CACCATCTTT GATGAGACCA AAAGCTGGTA CTTCACTGAA |
| 3901 | AATATGGAAA GAAACTGCAG GGCTCCCTGC AATATCCAGA TGGAAGATCC |
| 3951 | CACTTTTAAA GAGAATTATC GCTTCCATGC AATCAATGGC TACATAATGG |
| 4001 | ATACACTACC TGGCTTAGTA ATGGCTCAGG ATCAAAGGAT TCGATGGTAT |
| 4051 | CTGCTCAGCA TGGGCAGCAA TGAAAACATC CATTCTATTC ATTTCAGTGG |
| 4101 | ACATGTGTTC ACTGTACGAA AAAAAGAGGA GTATAAAATG GCACTGTACA |
| 4151 | ATCTCTATCC AGGTGTTTTT GAGACAGTGG AAATGTTACC ATCCAAAGCT |
| 4201 | GGAATTTGGC GGGTGGAATG CCTTATTGGC GAGCATCTAC ATGCTGGGAT |
| 4251 | GAGCACACTT TTTCTGGTGT ACAGCAATAA GTGTCAGACT CCCCTGGGAA |
| 4301 | TGGCTTCTGG ACACATTAGA GATTTTCAGA TTACAGCTTC AGGACAATAT |
| 4351 | GGACAGTGGG CCCCAAAGCT GGCCAGACTT CATTATTCCG GATCAATCAA |
| 4401 | TGCCTGGAGC ACCAAGGAGC CCTTTTCTTG GATCAAGGTG GATCTGTTGG |
| 4451 | CACCAATGAT TATTCACGGC ATCAAGACCC AGGGTGCCCG TCAGAAGTTC |
| 4501 | TCCAGCCTCT ACATCTCTCA GTTTATCATC ATGTATAGTC TTGATGGGAA |
| 4551 | GAAGTGGCAG ACTTATCGAG GAAATTCCAC TGGAACCTTA ATGGTCTTCT |
| 4601 | TTGGCAATGT GGATTCATCT GGGATAAAAC ACAATATTTT TAACCCTCCA |
| 4651 | ATTATTGCTC GATACATCCG TTTGCACCCA ACTCATTATA GCATTCGCAG |
| 4701 | CACTCTTCGC ATGGAGTTGA TGGGCTGTGA TTTAAATAGT TGCAGCATGC |
| 4751 | CATTGGGAAT GGAGAGTAAA GCAATATCAG ATGCACAGAT TACTGCTTCA |
| 4801 | TCCTACTTTA CCAATATGTT TGCCACCTGG TCTCCTTCAA AAGCTCGACT |
| 4851 | TCACCTCCAA GGGAGGAGTA ATGCCTGGAG ACCTCAGGTG AATAATCCAA |
| 4901 | AAGAGTGGCT GCAAGTGGAC TTCCAGAAGA CAATGAAAGT CACAGGAGTA |
| 4951 | ACTACTCAGG GAGTAAAATC TCTGCTTACC AGCATGTATG TGAAGGAGTT |
| 5001 | CCTCATCTCC AGCAGTCAAG ATGGCCATCA GTGGACTCTC TTTTTTCAGA |
| 5051 | ATGGCAAAGT AAAGGTTTTT CAGGGAAATC AAGACTCCTT CACACCTGTG |
| 5101 | GTGAACTCTC TAGACCCACC GTTACTGACT CGCTACCTTC GAATTCACCC |
| 5151 | CCAGAGTTGG GTGCACCAGA TTGCCCTGAG GATGGAGGTT CTGGGCTGCG |
| 5201 | AGGCACAGGA CCTCTACGAC AAAACTCACA CATGCCCACC GTGCCCAGCT |
| 5251 | CCAGAACTCC TGGGCGGACC GTCAGTCTTC CTCTTCCCCC CAAAACCCAA |
| 5301 | GGACACCCTC ATGATCTCCC GGACCCCTGA GGTCACATGC GTGGTGGTGG |
| 5351 | ACGTGAGCCA CGAAGACCCT GAGGTCAAGT TCAACTGGTA CGTGGACGGC |
| 5401 | GTGGAGGTGC ATAATGCCAA GACAAAGCCG CGGGAGGAGC AGTACAACAG |
| 5451 | CACGTACCGT GTGGTCAGCG TCCTCACCGT CCTGCACCAG GACTGGCTGA |
| 5501 | ATGGCAAGGA GTACAAGTGC AAGGTCTCCA ACAAAGCCCT CCCAGCCCCC |
| 5551 | ATCGAGAAAA CCATCTCCAA AGCCAAAGGG CAGCCCCGAG AACCACAGGT |
| 5601 | GTACACCCTG CCCCCATCCC GGGATGAGCT GACCAAGAAC CAGGTCAGCC |
| 5651 | TGACCTGCCT GGTCAAAGGC TTCTATCCCA GCGACATCGC CGTGGAGTGG |
| 5701 | GAGAGCAATG GGCAGCCGGA GAACAACTAC AAGACCACGC CTCCCGTGTT |
| 5751 | GGACTCCGAC GGCTCCTTCT TCCTCTACAG CAAGCTCACC GTGGACAAGA |
| 5801 | GCAGGTGGCA GCAGGGGAAC GTCTTCTCAT GCTCCGTGAT GCATGAGGCT |
| 5851 | CTGCACAACC ACTACACGCA GAAGAGCCTC TCCCTGTCTC CGGGTAAATG |

pSYN FVIII 312 Protein Sequence (FVIII with Complete B-Domain Deletion Except 5 Amino Acid Residues and 288 AE-XTEN Inserted after aa 745-B5 Version) (SEQ ID NO:173)

| | |
|---|---|
| 1 | ATRRYYLGAV ELSWDYMQSD LGELPVDARF PPRVPKSFPF NTSVVYKKTL |
| 51 | FVEFTDHLFN IAKPRPPWMG LLGPTIQAEV YDTVVITLKN MASHPVSLHA |
| 101 | VGVSYWKASE GAEYDDQTSQ REKEDDKVFP GGSHTYVWQV LKENGPMASD |
| 151 | PLCLTYSYLS HVDLVKDLNS GLIGALLVCR EGSLAKEKTQ TLHKFILLFA |
| 201 | VFDEGKSWHS ETKNSLMQDR DAASARAWPK MHTVNGYVNR SLPGLIGCHR |
| 251 | KSVYWHVIGM GTTPEVHSIF LEGHTFLVRN HRQASLEISP ITFLTAQTLL |
| 301 | MDLGQFLLFC HISSHQHDGM EAYVKVDSCP EEPQLRMKNN EEAEDYDDDL |
| 351 | TDSEMDVVRF DDDNSPSFIQ IRSVAKKHPK TWVHYIAAEE EDWDYAPLVL |
| 401 | APDDRSYKSQ YLNNGPQRIG RKYKKVRFMA YTDETFKTRE AIQHESGILG |
| 451 | PLLYGEVGDT LLIIFKNQAS RPYNIYPHGI TDVRPLYSRR LPKGVKHLKD |
| 501 | FPILPGEIFK YKWTVTVEDG PTKSDPRCLT RYYSSFVNME RDLASGLIGP |
| 551 | LLICYKESVD QRGNQIMSDK RNVILFSVFD ENRSWYLTEN IQRFLPNPAG |
| 601 | VQLEDPEFQA SNIMHSINGY VFDSLQLSVC LHEVAYWYIL SIGAQTDFLS |
| 651 | VFFSGYTFKH KMVYEDTLTL FPFSGETVFM SMENPGLWIL GCHNSDFRNR |
| 701 | GMTALLKVSS CDKNTGDYYE DSYEDISAYL LSKNNAIEPR SFSQNGTSES |
| 751 | ATPESGPGSE PATSGSETPG TSESATPESG PGSEPATSGS ETPGTSESAT |
| 801 | PESGPGTSTE PSEGSAPGSP AGSPTSTEEG TSESATPESG PGSEPATSGS |
| 851 | ETPGTSESAT PESGPGSPAG SPTSTEEGSP AGSPTSTEEG TSTEPSEGSA |
| 901 | PGTSESATPE SGPGTSESAT PESGPGTSES ATPESGPGSE PATSGSETPG |
| 951 | SEPATSGSET PGSPAGSPTS TEEGTSTEPS EGSAPGTSTE PSEGSAPGSE |
| 1001 | PATSGSETPG TSESATPESG PGTSTEPSEG SAPASSEITR TTLQSDQEEI |
| 1051 | DYDDTISVEM KKEDFDIYDE DENQSPRSFQ KKTRHYFIAA VERLWDYGMS |
| 1101 | SSPHVLRNRA QSGSVPQFKK VVFQEFTDGS FTQPLYRGEL NEHLGLLGPY |
| 1151 | IRAEVEDNIM VTFRNQASRP YSFYSSLISY EEDQRQGAEP RKNFVKPNET |
| 1201 | KTYFWKVQHH MAPTKDEFDC KAWAYFSDVD LEKDVHSGLI GPLLVCHTNT |
| 1251 | LNPAHGRQVT VQEFALFFTI FDETKSWYFT ENMERNCRAP CNIQMEDPTF |
| 1301 | KENYRFHAIN GYIMDTLPGL VMAQDQRIRW YLLSMGSNEN IHSIHFSGHV |
| 1351 | FTVRKKEEYK MALYNLYPGV FETVEMLPSK AGIWRVECLI GEHLHAGMST |
| 1401 | LFLVYSNKCQ TPLGMASGHI RDFQITASGQ YGQWAPKLAR LHYSGSINAW |
| 1451 | STKEPFSWIK VDLLAPMIIH GIKTQGARQK FSSLYISQFI IMYSLDGKKW |
| 1501 | QTYRGNSTGT LMVFFGNVDS SGIKHNIFNP PIIARYIRLH PTHYSIRSTL |
| 1551 | RMELMGCDLN SCSMPLGMES KAISDAQITA SSYFTNMFAT WSPSKARLHL |
| 1601 | QGRSNAWRPQ VNNPKEWLQV DFQKTMKVTG VTTQGVKSLL TSMYVKEFLI |
| 1651 | SSSQDGHQWT LFFQNGKVKV FQGNQDSFTP VVNSLDPPLL TRYLRIHPQS |
| 1701 | WVHQIALRME VLGCEAQDLY DKTHTCPPCP APELLGGPSV FLFPPKPKDT |
| 1751 | LMISRTPEVT CVVVDVSHED PEVKFNWYVD GVEVHNAKTK PREEQYNSTY |
| 1801 | RVVSVLTVLH QDWLNGKEYK CKVSNKALPA PIEKTISKAK GQPREPQVYT |
| 1851 | LPPSRDELTK NQVSLTCLVK GFYPSDIAVE WESNGQPENN YKTTPPVLDS |
| 1901 | DGSFFLYSKL TVDKSRWQQG NVFSCSVMHE ALHNHYTQKS LSLSPGK* |

pSYN VWF059 Nucleotide Sequence (Encoding VWF D′D3-Fc with Acidic Region 2 (a2) Thrombin Site in the Linker) (SEQ ID NO: 196)

| | |
|---|---|
| 1 | ATGATTCCTG CCAGATTTGC CGGGGTGCTG CTTGCTCTGG CCCTCATTTT |
| 51 | GCCAGGGACC CTTTGTGCAG AAGGAACTCG CGGCAGGTCA TCCACGGCCC |
| 101 | GATGCAGCCT TTTCGGAAGT GACTTCGTCA ACACCTTTGA TGGGAGCATG |
| 151 | TACAGCTTTG CGGGATACTG CAGTTACCTC CTGGCAGGGG GCTGCCAGAA |
| 201 | ACGCTCCTTC TCGATTATTG GGGACTTCCA GAATGGCAAG AGAGTGAGCC |
| 251 | TCTCCGTGTA TCTTGGGGAA TTTTTTGACA TCCATTTGTT TGTCAATGGT |
| 301 | ACCGTGACAC AGGGGGACCA AAGAGTCTCC ATGCCCTATG CCTCCAAAGG |
| 351 | GCTGTATCTA GAAACTGAGG CTGGGTACTA CAAGCTGTCC GGTGAGGCCT |
| 401 | ATGGCTTTGT GGCCAGGATC GATGGCAGCG GCAACTTTCA AGTCCTGCTG |
| 451 | TCAGACAGAT ACTTCAACAA GACCTGCGGG CTGTGTGGCA ACTTTAACAT |
| 501 | CTTTGCTGAA GATGACTTTA TGACCCAAGA AGGGACCTTG ACCTCGGACC |
| 551 | CTTATGACTT TGCCAACTCA TGGGCTCTGA GCAGTGGAGA ACAGTGGTGT |
| 601 | GAACGGGCAT CTCCTCCCAG CAGCTCATGC AACATCTCCT CTGGGGAAAT |
| 651 | GCAGAAGGGC CTGTGGGAGC AGTGCCAGCT TCTGAAGAGC ACCTCGGTGT |
| 701 | TTGCCCGCTG CCACCCTCTG GTGGACCCCG AGCCTTTTGT GGCCCTGTGT |
| 751 | GAGAAGACTT TGTGTGAGTG TGCTGGGGGG CTGGAGTGCG CCTGCCCTGC |
| 801 | CCTCCTGGAG TACGCCCGGA CCTGTGCCCA GGAGGGAATG GTGCTGTACG |
| 851 | GCTGGACCGA CCACAGCGCG TGCAGCCCAG TGTGCCCTGC TGGTATGGAG |
| 901 | TATAGGCAGT GTGTGTCCCC TTGCGCCAGG ACCTGCCAGA GCCTGCACAT |
| 951 | CAATGAAATG TGTCAGGAGC GATGCGTGGA TGGCTGCAGC TGCCCTGAGG |
| 1001 | GACAGCTCCT GGATGAAGGC CTCTGCGTGG AGAGCACCGA GTGTCCCTGC |
| 1051 | GTGCATTCCG GAAAGCGCTA CCCTCCCGGC ACCTCCCTCT CTCGAGACTG |
| 1101 | CAACACCTGC ATTTGCCGAA ACAGCCAGTG GATCTGCAGC AATGAAGAAT |
| 1151 | GTCCAGGGGA GTGCCTTGTC ACTGGTCAAT CCCACTTCAA GAGCTTTGAC |
| 1201 | AACAGATACT TCACCTTCAG TGGGATCTGC CAGTACCTGC TGGCCCGGGA |
| 1251 | TTGCCAGGAC CACTCCTTCT CCATTGTCAT TGAGACTGTC CAGTGTGCTG |
| 1301 | ATGACCGCGA CGCTGTGTGC ACCCGCTCCG TCACCGTCCG GCTGCCTGGC |
| 1351 | CTGCACAACA GCCTTGTGAA ACTGAAGCAT GGGGCAGGAG TTGCCATGGA |
| 1401 | TGGCCAGGAC ATCCAGCTCC CCCTCCTGAA AGGTGACCTC CGCATCCAGC |
| 1451 | ATACAGTGAC GGCCTCCGTG CGCCTCAGCT ACGGGGAGGA CCTGCAGATG |
| 1501 | GACTGGGATG GCCGCGGGAG GCTGCTGGTG AAGCTGTCCC CCGTCTATGC |
| 1551 | CGGGAAGACC TGCGGCCTGT GTGGGAATTA CAATGGCAAC CAGGGCGACG |
| 1601 | ACTTCCTTAC CCCCTCTGGG CTGGCGGAGC CCCGGGTGGA GGACTTCGGG |
| 1651 | AACGCCTGGA AGCTGCACGG GGACTGCCAG GACCTGCAGA AGCAGCACAG |
| 1701 | CGATCCCTGC GCCCTCAACC CGCGCATGAC CAGGTTCTCC GAGGAGGCGT |
| 1751 | GCGCGGTCCT GACGTCCCCC ACATTCGAGG CCTGCCATCG TGCCGTCAGC |
| 1801 | CCGCTGCCCT ACCTGCGGAA CTGCCGCTAC GACGTGTGCT CCTGCTCGGA |
| 1851 | CGGCCGCGAG TGCCTGTGCG GCGCCCTGGC CAGCTATGCC GCGGCCTGCG |
| 1901 | CGGGGAGAGG CGTGCGCGTC GCGTGGCGCG AGCCAGGCCG CTGTGAGCTG |
| 1951 | AACTGCCCGA AAGGCCAGGT GTACCTGCAG TGCGGGACCC CCTGCAACCT |
| 2001 | GACCTGCCGC TCTCTCTCTT ACCCGGATGA GGAATGCAAT GAGGCCTGCC |
| 2051 | TGGAGGGCTG CTTCTGCCCC CCAGGGCTCT ACATGGATGA GAGGGGGGAC |
| 2101 | TGCGTGCCCA AGGCCCAGTG CCCCTGTTAC TATGACGGTG AGATCTTCCA |
| 2151 | GCCAGAAGAC ATCTTCTCAG ACCATCACAC CATGTGCTAC TGTGAGGATG |
| 2201 | GCTTCATGCA CTGTACCATG AGTGGAGTCC CCGGAAGCTT GCTGCCTGAC |
| 2251 | GCTGTCCTCA GCAGTCCCCT GTCTCATCGC AGCAAAAGGA GCCTATCCTG |
| 2301 | TCGGCCCCCC ATGGTCAAGC TGGTGTGTCC CGCTGACAAC CTGCGGGCTG |
| 2351 | AAGGGCTCGA GTGTACCAAA ACGTGCCAGA ACTATGACCT GGAGTGCATG |
| 2401 | AGCATGGGCT GTGTCTCTGG CTGCCTCTGC CCCCCGGGCA TGGTCCGGCA |
| 2451 | TGAGAACAGA TGTGTGGCCC TGGAAAGGTG TCCCTGCTTC CATCAGGGCA |
| 2501 | AGGAGTATGC CCCTGGAGAA ACAGTGAAGA TTGGCTGCAA CACTTGTGTC |
| 2551 | TGTCGGGACC GGAAGTGGAA CTGCACAGAC CATGTGTGTG ATGCCACGTG |
| 2601 | CTCCACGATC GGCATGGCCC ACTACCTCAC CTTCGACGGG CTCAAATACC |
| 2651 | TGTTCCCCGG GGAGTGCCAG TACGTTCTGG TGCAGGATTA CTGCGGCAGT |
| 2701 | AACCCTGGGA CCTTTCGGAT CCTAGTGGGG AATAAGGGAT GCAGCCACCC |
| 2751 | CTCAGTGAAA TGCAAGAAAC GGGTCACCAT CCTGGTGGAG GGAGGAGAGA |
| 2801 | TTGAGCTGTT TGACGGGGAG GTGAATGTGA AGAGGCCCAT GAAGGATGAG |
| 2851 | ACTCACTTTG AGGTGGTGGA GTCTGGCCGG TACATCATTC TGCTGCTGGG |
| 2901 | CAAAGCCCTC TCCGTGGTCT GGGACCGCCA CCTGAGCATC TCCGTGGTCC |
| 2951 | TGAAGCAGAC ATACCAGGAG AAAGTGTGTG GCCTGTGTGG GAATTTTGAT |
| 3001 | GGCATCCAGA ACAATGACCT CACCAGCAGC AACCTCCAAG TGGAGGAAGA |
| 3051 | CCCTGTGGAC TTTGGGAACT CCTGGAAAGT GAGCTCGCAG TGTGCTGACA |
| 3101 | CCAGAAAAGT GCCTCTGGAC TCATCCCCTG CCACCTGCCA TAACAACATC |
| 3151 | ATGAAGCAGA CGATGGTGGA TTCCTCCTGT AGAATCCTTA CCAGTGACGT |
| 3201 | CTTCCAGGAC TGCAACAAGC TGGTGGACCC CGAGCCATAT CTGGATGTCT |
| 3251 | GCATTTACGA CACCTGCTCC TGTGAGTCCA TTGGGGACTG CGCCGCATTC |
| 3301 | TGCGACACCA TTGCTGCCTA TGCCCACGTG TGTGCCCAGC ATGGCAAGGT |
| 3351 | GGTGACCTGG AGGACGGCCA CATTGTGCCC CCAGAGCTGC GAGGAGAGGA |
| 3401 | ATCTCCGGGA GAACGGGTAT GAGGCTGAGT GGCGCTATAA CAGCTGTGCA |
| 3451 | CCTGCCTGTC AAGTCACGTG TCAGCACCCT GAGCCACTGG CCTGCCCTGT |
| 3501 | GCAGTGTGTG GAGGGCTGCC ATGCCCACTG CCCTCCAGGG AAAATCCTGG |
| 3551 | ATGAGCTTTT GCAGACCTGC GTTGACCCTG AAGACTGTCC AGTGTGTGAG |
| 3601 | GTGGCTGGCC GGCGTTTTGC CTCAGGAAAG AAAGTCACCT TGAATCCCAG |
| 3651 | TGACCCTGAG CACTGCCAGA TTTGCCACTG TGATGTTGTC AACCTCACCT |
| 3701 | GTGAAGCCTG CCAGGAGCCG ATATCGGGCG CGCCAACATC AGAGAGCGCC |
| 3751 | ACCCCTGAAA GTGGTCCCGG GAGCGAGCCA GCCACATCTG GGTCGGAAAC |
| 3801 | GCCAGGCACA AGTGAGTCTG CAACTCCCGA GTCCGGACCT GGCTCCGAGC |
| 3851 | CTGCCACTAG CGGCTCCGAG ACTCCGGGAA CTTCCGAGAG CGCTACACCA |
| 3901 | GAAAGCGGAC CCGGAACCAG TACCGAACCT AGCGAGGGCT CTGCTCCGGG |
| 3951 | CAGCCCAGCC GGCTCTCCTA CATCCACGGA GGAGGGCACT TCCGAATCCG |
| 4001 | CCACCCCGGA GTCAGGGCCA GGATCTGAAC CCGCTACCTC AGGCAGTGAG |
| 4051 | ACGCCAGGAA CGAGCGAGTC CGCTACACCG GAGAGTGGGC CAGGGAGCCC |
| 4101 | TGCTGGATCT CCTACGTCCA CTGAGGAAGG GTCACCAGCG GGCTCGCCCA |
| 4151 | CCAGCACTGA AGAAGGTGCC TCGATATCTG ACAAGAACAC TGGTGATTAT |
| 4201 | TACGAGGACA GTTATGAAGA TATTTCAGCA TACTTGCTGA GTAAAAACAA |
| 4251 | TGCCATTGAA CCAAGAAGCT TCTCTGACAA AACTCACACA TGCCCACCGT |
| 4301 | GCCCAGCTCC AGAACTCCTG GGCGGACCGT CAGTCTTCCT CTTCCCCCCA |
| 4351 | AAACCCAAGG ACACCCTCAT GATCTCCCGG ACCCCTGAGG TCACATGCGT |
| 4401 | GGTGGTGGAC GTGAGCCACG AAGACCCTGA GGTCAAGTTC AACTGGTACG |
| 4451 | TGGACGGCGT GGAGGTGCAT AATGCCAAGA CAAAGCCGCG GGAGGAGCAG |
| 4501 | TACAACAGCA CGTACCGTGT GGTCAGCGTC CTCACCGTCC TGCACCAGGA |
| 4551 | CTGGCTGAAT GGCAAGGAGT ACAAGTGCAA GGTCTCCAAC AAAGCCCTCC |
| 4601 | CAGCCCCCAT CGAGAAAACC ATCTCCAAAG CCAAAGGGCA GCCCCGAGAA |
| 4651 | CCACAGGTGT ACACCCTGCC CCCATCCCGG GATGAGCTGA CCAAGAACCA |
| 4701 | GGTCAGCCTG ACCTGCCTGG TCAAAGGCTT CTATCCCAGC GACATCGCCG |
| 4751 | TGGAGTGGGA GAGCAATGGG CAGCCGGAGA ACAACTACAA GACCACGCCT |
| 4801 | CCCGTGTTGG ACTCCGACGG CTCCTTCTTC CTCTACAGCA AGCTCACCGT |
| 4851 | GGACAAGAGC AGGTGGCAGC AGGGGAACGT CTTCTCATGC TCCGTGATGC |
| 4901 | ATGAGGCTCT GCACAACCAC TACACGCAGA AGAGCCTCTC CCTGTCTCCG |
| 4951 | GGTAAATGA |

pSYN VWF059 Protein Sequence (VWF D′D3-Fc with a2 Region of FVIII Thrombin Site in the Linker)—Bold Underlined Area Shows a2 Region (SEQ ID NO: 197)

| | |
|---|---|
| 1 | MIPARFAGVL LALALILPGT LCAEGTRGRS STARCSLFGS DFVNTFDGSM |
| 51 | YSFAGYCSYL LAGGCQKRSF SIIGDFQNGK RVSLSVYLGE FFDIHLFVNG |
| 101 | TVTQGDQRVS MPYASKGLYL ETEAGYYKLS GEAYGFVARI DGSGNFQVLL |
| 151 | SDRYFNKTCG LCGNFNIFAE DDFMTQEGTL TSDPYDFANS WALSSGEQWC |
| 201 | ERASPPSSSC NISSGEMQKG LWEQCQLLKS TSVFARCHPL VDPEPFVALC |
| 251 | EKTLCECAGG LECACPALLE YARTCAQEGM VLYGWTDHSA CSPVCPAGME |
| 301 | YRQCVSPCAR TCQSLHINEM CQERCVDGCS CPEGQLLDEG LCVESTECPC |
| 351 | VHSGKRYPPG TSLSRDCNTC ICRNSQWICS NEECPGECLV TGQSHFKSFD |
| 401 | NRYFTFSGIC QYLLARDCQD HSFSIVIETV QCADDRDAVC TRSVTVRLPG |
| 451 | LHNSLVKLKH GAGVAMDGQD IQLPLLKGDL RIQHTVTASV RLSYGEDLQM |
| 501 | DWDGRGRLLV KLSPVYAGKT CGLCGNYNGN QGDDFLTPSG LAEPRVEDFG |
| 551 | NAWKLHGDCQ DLQKQHSDPC ALNPRMTRFS EEACAVLTSP TFEACHRAVS |
| 601 | PLPYLRNCRY DVCSCSDGRE CLCGALASYA AACAGRGVRV AWREPGRCEL |
| 651 | NCPKGQVYLQ CGTPCNLTCR SLSYPDEECN EACLEGCFCP PGLYMDERGD |
| 701 | CVPKAQCPCY YDGEIFQPED IFSDHHTMCY CEDGFMHCTM SGVPGSLLPD |
| 751 | AVLSSPLSHR SKRSLSCRPP MVKLVCPADN LRAEGLECTK TCQNYDLECM |
| 801 | SMGCVSGCLC PPGMVRHENR CVALERCPCF HQGKEYAPGE TVKIGCNTCV |
| 851 | CRDRKWNCTD HVCDATCSTI GMAHYLTFDG LKYLFPGECQ YVLVQDYCGS |
| 901 | NPGTFRILVG NKGCSHPSVK CKKRVTILVE GGEIELFDGE VNVKRPMKDE |
| 951 | THFEVVESGR YIILLLGKAL SVVWDRHLSI SVVLKQTYQE KVCGLCGNFD |
| 1001 | GIQNNDLTSS NLQVEEDPVD FGNSWKVSSQ CADTRKVPLD SSPATCHNNI |
| 1051 | MKQTMVDSSC RILTSDVFQD CNKLVDPEPY LDVCIYDTCS CESIGDCAAF |
| 1101 | CDTIAAYAHV CAQHGKVVTW RTATLCPQSC EERNLRENGY EAEWRYNSCA |
| 1151 | PACQVTCQHP EPLACPVQCV EGCHAHCPPG KILDELLQTC VDPEDCPVCE |
| 1201 | VAGRRFASGK KVTLNPSDPE HCQICHCDVV NLTCEACQEP ISGAPTSESA |
| 1251 | TPESGPGSEP ATSGSETPGT SESATPESGP GSEPATSGSE TPGTSESATP |
| 1301 | ESGPGTSTEP SEGSAPGSPA GSPTSTEEGT SESATPESGP GSEPATSGSE |
| 1351 | TPGTSESATP ESGPGSPAGS PTSTEEGSPA GSPTSTEEGA SISDKNTGDY |
| 1401 | YEDSYEDISA YLLSKNNAIE PRSFSDKTHT CPPCPAPELL GGPSVFLFPP |
| 1451 | KPKDTLMISR TPEVTCVVVD VSHEDPEVKF NWYVDGVEVH NAKTKPREEQ |
| 1501 | YNSTYRVVSV LTVLHQDWLN GKEYKCKVSN KALPAPIEKT ISKAKGQPRE |
| 1551 | PQVYTLPPSR DELTKNQVSL TCLVKGFYPS DIAVEWESNG QPENNYKTTP |
| 1601 | PVLDSDGSFF LYSKLTVDKS RWQQGNVFSC SVMHEALHNH YTQKSLSLSP |
| 1651 | GK* |

pSYN VWF062 Nucleotide Sequence (Encoding VWF D′D3-Fc with No Thrombin Site in the Linker) (SEQ ID NO: 198)

| | |
|---|---|
| 1 | ATGATTCCTG CCAGATTTGC CGGGGTGCTG CTTGCTCTGG CCCTCATTTT |
| 51 | GCCAGGGACC CTTTGTGCAG AAGGAACTCG CGGCAGGTCA TCCACGGCCC |
| 101 | GATGCAGCCT TTTCGGAAGT GACTTCGTCA ACACCTTTGA TGGGAGCATG |
| 151 | TACAGCTTTG CGGGATACTG CAGTTACCTC CTGGCAGGGG GCTGCCAGAA |
| 201 | ACGCTCCTTC TCGATTATTG GGGACTTCCA GAATGGCAAG AGAGTGAGCC |
| 251 | TCTCCGTGTA TCTTGGGGAA TTTTTTGACA TCCATTTGTT TGTCAATGGT |
| 301 | ACCGTGACAC AGGGGGACCA AAGAGTCTCC ATGCCCTATG CCTCCAAAGG |
| 351 | GCTGTATCTA GAAACTGAGG CTGGGTACTA CAAGCTGTCC GGTGAGGCCT |
| 401 | ATGGCTTTGT GGCCAGGATC GATGGCAGCG GCAACTTTCA AGTCCTGCTG |
| 451 | TCAGACAGAT ACTTCAACAA GACCTGCGGG CTGTGTGGCA ACTTTAACAT |
| 501 | CTTTGCTGAA GATGACTTTA TGACCCAAGA AGGGACCTTG ACCTCGGACC |
| 551 | CTTATGACTT TGCCAACTCA TGGGCTCTGA GCAGTGGAGA ACAGTGGTGT |
| 601 | GAACGGGCAT CTCCTCCCAG CAGCTCATGC AACATCTCCT CTGGGGAAAT |
| 651 | GCAGAAGGGC CTGTGGGAGC AGTGCCAGCT TCTGAAGAGC ACCTCGGTGT |
| 701 | TTGCCCGCTG CCACCCTCTG GTGGACCCCG AGCCTTTTGT GGCCCTGTGT |
| 751 | GAGAAGACTT TGTGTGAGTG TGCTGGGGGG CTGGAGTGCG CCTGCCCTGC |
| 801 | CCTCCTGGAG TACGCCCGGA CCTGTGCCCA GGAGGGAATG GTGCTGTACG |
| 851 | GCTGGACCGA CCACAGCGCG TGCAGCCCAG TGTGCCCTGC TGGTATGGAG |
| 901 | TATAGGCAGT GTGTGTCCCC TTGCGCCAGG ACCTGCCAGA GCCTGCACAT |
| 951 | CAATGAAATG TGTCAGGAGC GATGCGTGGA TGGCTGCAGC TGCCCTGAGG |
| 1001 | GACAGCTCCT GGATGAAGGC CTCTGCGTGG AGAGCACCGA GTGTCCCTGC |
| 1051 | GTGCATTCCG GAAAGCGCTA CCCTCCCGGC ACCTCCCTCT CTCGAGACTG |
| 1101 | CAACACCTGC ATTTGCCGAA ACAGCCAGTG GATCTGCAGC AATGAAGAAT |
| 1151 | GTCCAGGGGA GTGCCTTGTC ACTGGTCAAT CCCACTTCAA GAGCTTTGAC |
| 1201 | AACAGATACT TCACCTTCAG TGGGATCTGC CAGTACCTGC TGGCCCGGGA |
| 1251 | TTGCCAGGAC CACTCCTTCT CCATTGTCAT TGAGACTGTC CAGTGTGCTG |
| 1301 | ATGACCGCGA CGCTGTGTGC ACCCGCTCCG TCACCGTCCG GCTGCCTGGC |
| 1351 | CTGCACAACA GCCTTGTGAA ACTGAAGCAT GGGGCAGGAG TTGCCATGGA |
| 1401 | TGGCCAGGAC ATCCAGCTCC CCCTCCTGAA AGGTGACCTC CGCATCCAGC |
| 1451 | ATACAGTGAC GGCCTCCGTG CGCCTCAGCT ACGGGGAGGA CCTGCAGATG |
| 1501 | GACTGGGATG GCCGCGGGAG GCTGCTGGTG AAGCTGTCCC CCGTCTATGC |
| 1551 | CGGGAAGACC TGCGGCCTGT GTGGGAATTA CAATGGCAAC CAGGGCGACG |
| 1601 | ACTTCCTTAC CCCCTCTGGG CTGGCGGAGC CCCGGGTGGA GGACTTCGGG |
| 1651 | AACGCCTGGA AGCTGCACGG GGACTGCCAG GACCTGCAGA AGCAGCACAG |
| 1701 | CGATCCCTGC GCCCTCAACC CGCGCATGAC CAGGTTCTCC GAGGAGGCGT |
| 1751 | GCGCGGTCCT GACGTCCCCC ACATTCGAGG CCTGCCATCG TGCCGTCAGC |
| 1801 | CCGCTGCCCT ACCTGCGGAA CTGCCGCTAC GACGTGTGCT CCTGCTCGGA |
| 1851 | CGGCCGCGAG TGCCTGTGCG GCGCCCTGGC CAGCTATGCC GCGGCCTGCG |
| 1901 | CGGGGAGAGG CGTGCGCGTC GCGTGGCGCG AGCCAGGCCG CTGTGAGCTG |
| 1951 | AACTGCCCGA AAGGCCAGGT GTACCTGCAG TGCGGGACCC CCTGCAACCT |
| 2001 | GACCTGCCGC TCTCTCTCTT ACCCGGATGA GGAATGCAAT GAGGCCTGCC |
| 2051 | TGGAGGGCTG CTTCTGCCCC CCAGGGCTCT ACATGGATGA GAGGGGGGAC |
| 2101 | TGCGTGCCCA AGGCCCAGTG CCCCTGTTAC TATGACGGTG AGATCTTCCA |
| 2151 | GCCAGAAGAC ATCTTCTCAG ACCATCACAC CATGTGCTAC TGTGAGGATG |
| 2201 | GCTTCATGCA CTGTACCATG AGTGGAGTCC CCGGAAGCTT GCTGCCTGAC |
| 2251 | GCTGTCCTCA GCAGTCCCCT GTCTCATCGC AGCAAAAGGA GCCTATCCTG |
| 2301 | TCGGCCCCCC ATGGTCAAGC TGGTGTGTCC CGCTGACAAC CTGCGGGCTG |
| 2351 | AAGGGCTCGA GTGTACCAAA ACGTGCCAGA ACTATGACCT GGAGTGCATG |
| 2401 | AGCATGGGCT GTGTCTCTGG CTGCCTCTGC CCCCCGGGCA TGGTCCGGCA |
| 2451 | TGAGAACAGA TGTGTGGCCC TGGAAAGGTG TCCCTGCTTC CATCAGGGCA |
| 2501 | AGGAGTATGC CCCTGGAGAA ACAGTGAAGA TTGGCTGCAA CACTTGTGTC |
| 2551 | TGTCGGGACC GGAAGTGGAA CTGCACAGAC CATGTGTGTG ATGCCACGTG |
| 2601 | CTCCACGATC GGCATGGCCC ACTACCTCAC CTTCGACGGG CTCAAATACC |
| 2651 | TGTTCCCCGG GGAGTGCCAG TACGTTCTGG TGCAGGATTA CTGCGGCAGT |
| 2701 | AACCCTGGGA CCTTTCGGAT CCTAGTGGGG AATAAGGGAT GCAGCCACCC |
| 2751 | CTCAGTGAAA TGCAAGAAAC GGGTCACCAT CCTGGTGGAG GGAGGAGAGA |
| 2801 | TTGAGCTGTT TGACGGGGAG GTGAATGTGA AGAGGCCCAT GAAGGATGAG |
| 2851 | ACTCACTTTG AGGTGGTGGA GTCTGGCCGG TACATCATTC TGCTGCTGGG |
| 2901 | CAAAGCCCTC TCCGTGGTCT GGGACCGCCA CCTGAGCATC TCCGTGGTCC |
| 2951 | TGAAGCAGAC ATACCAGGAG AAAGTGTGTG GCCTGTGTGG GAATTTTGAT |
| 3001 | GGCATCCAGA ACAATGACCT CACCAGCAGC AACCTCCAAG TGGAGGAAGA |
| 3051 | CCCTGTGGAC TTTGGGAACT CCTGGAAAGT GAGCTCGCAG TGTGCTGACA |
| 3101 | CCAGAAAAGT GCCTCTGGAC TCATCCCCTG CCACCTGCCA TAACAACATC |
| 3151 | ATGAAGCAGA CGATGGTGGA TTCCTCCTGT AGAATCCTTA CCAGTGACGT |
| 3201 | CTTCCAGGAC TGCAACAAGC TGGTGGACCC CGAGCCATAT CTGGATGTCT |
| 3251 | GCATTTACGA CACCTGCTCC TGTGAGTCCA TTGGGGACTG CGCCGCATTC |
| 3301 | TGCGACACCA TTGCTGCCTA TGCCCACGTG TGTGCCCAGC ATGGCAAGGT |
| 3351 | GGTGACCTGG AGGACGGCCA CATTGTGCCC CCAGAGCTGC GAGGAGAGGA |
| 3401 | ATCTCCGGGA GAACGGGTAT GAGGCTGAGT GGCGCTATAA CAGCTGTGCA |
| 3451 | CCTGCCTGTC AAGTCACGTG TCAGCACCCT GAGCCACTGG CCTGCCCTGT |
| 3501 | GCAGTGTGTG GAGGGCTGCC ATGCCCACTG CCCTCCAGGG AAAATCCTGG |
| 3551 | ATGAGCTTTT GCAGACCTGC GTTGACCCTG AAGACTGTCC AGTGTGTGAG |
| 3601 | GTGGCTGGCC GGCGTTTTGC CTCAGGAAAG AAAGTCACCT TGAATCCCAG |
| 3651 | TGACCCTGAG CACTGCCAGA TTTGCCACTG TGATGTTGTC AACCTCACCT |
| 3701 | GTGAAGCCTG CCAGGAGCCG ATATCGGGCG CGCCAACATC AGAGAGCGCC |
| 3751 | ACCCCTGAAA GTGGTCCCGG GAGCGAGCCA GCCACATCTG GGTCGGAAAC |
| 3801 | GCCAGGCACA AGTGAGTCTG CAACTCCCGA GTCCGGACCT GGCTCCGAGC |
| 3851 | CTGCCACTAG CGGCTCCGAG ACTCCGGGAA CTTCCGAGAG CGCTACACCA |
| 3901 | GAAAGCGGAC CCGGAACCAG TACCGAACCT AGCGAGGGCT CTGCTCCGGG |
| 3951 | CAGCCCAGCC GGCTCTCCTA CATCCACGGA GGAGGGCACT TCCGAATCCG |
| 4001 | CCACCCCGGA GTCAGGGCCA GGATCTGAAC CCGCTACCTC AGGCAGTGAG |
| 4051 | ACGCCAGGAA CGAGCGAGTC CGCTACACCG GAGAGTGGGC CAGGGAGCCC |
| 4101 | TGCTGGATCT CCTACGTCCA CTGAGGAAGG GTCACCAGCG GGCTCGCCCA |
| 4151 | CCAGCACTGA AGAAGGTGCC TCGAGCGACA AAACTCACAC ATGCCCACCG |
| 4201 | TGCCCAGCTC CAGAACTCCT GGGCGGACCG TCAGTCTTCC TCTTCCCCCC |
| 4251 | AAAACCCAAG GACACCCTCA TGATCTCCCG GACCCCTGAG GTCACATGCG |
| 4301 | TGGTGGTGGA CGTGAGCCAC GAAGACCCTG AGGTCAAGTT CAACTGGTAC |
| 4351 | GTGGACGGCG TGGAGGTGCA TAATGCCAAG ACAAAGCCGC GGGAGGAGCA |
| 4401 | GTACAACAGC ACGTACCGTG TGGTCAGCGT CCTCACCGTC CTGCACCAGG |
| 4451 | ACTGGCTGAA TGGCAAGGAG TACAAGTGCA AGGTCTCCAA CAAAGCCCTC |
| 4501 | CCAGCCCCCA TCGAGAAAAC CATCTCCAAA GCCAAAGGGC AGCCCCGAGA |
| 4551 | ACCACAGGTG TACACCCTGC CCCCATCCCG GGATGAGCTG ACCAAGAACC |
| 4601 | AGGTCAGCCT GACCTGCCTG GTCAAAGGCT TCTATCCCAG CGACATCGCC |
| 4651 | GTGGAGTGGG AGAGCAATGG GCAGCCGGAG AACAACTACA AGACCACGCC |
| 4701 | TCCCGTGTTG GACTCCGACG GCTCCTTCTT CCTCTACAGC AAGCTCACCG |
| 4751 | TGGACAAGAG CAGGTGGCAG CAGGGGAACG TCTTCTCATG CTCCGTGATG |
| 4801 | CATGAGGCTC TGCACAACCA CTACACGCAG AAGAGCCTCT CCCTGTCTCC |
| 4851 | GGGTAAATGA |

pSYN VWF062 Protein Sequence (VWF D′D3-Fc with No Thrombin Site in the Linker) (SEQ ID NO: 199)

| | |
|---|---|
| 1 | MIPARFAGVL LALALILPGT LCAEGTRGRS STARCSLFGS DFVNTFDGSM |
| 51 | YSFAGYCSYL LAGGCQKRSF SIIGDFQNGK RVSLSVYLGE FFDIHLFVNG |
| 101 | TVTQGDQRVS MPYASKGLYL ETEAGYYKLS GEAYGFVARI DGSGNFQVLL |
| 151 | SDRYFNKTCG LCGNFNIFAE DDFMTQEGTL TSDPYDFANS WALSSGEQWC |
| 201 | ERASPPSSSC NISSGEMQKG LWEQCQLLKS TSVFARCHPL VDPEPFVALC |
| 251 | EKTLCECAGG LECACPALLE YARTCAQEGM VLYGWTDHSA CSPVCPAGME |
| 301 | YRQCVSPCAR TCQSLHINEM CQERCVDGCS CPEGQLLDEG LCVESTECPC |
| 351 | VHSGKRYPPG TSLSRDCNTC ICRNSQWICS NEECPGECLV TGQSHFKSFD |
| 401 | NRYFTFSGIC QYLLARDCQD HSFSIVIETV QCADDRDAVC TRSVTVRLPG |
| 451 | LHNSLVKLKH GAGVAMDGQD IQLPLLKGDL RIQHTVTASV RLSYGEDLQM |
| 501 | DWDGRGRLLV KLSPVYAGKT CGLCGNYNGN QGDDFLTPSG LAEPRVEDFG |
| 551 | NAWKLHGDCQ DLQKQHSDPC ALNPRMTRFS EEACAVLTSP TFEACHRAVS |
| 601 | PLPYLRNCRY DVCSCSDGRE CLCGALASYA AACAGRGVRV AWREPGRCEL |
| 651 | NCPKGQVYLQ CGTPCNLTCR SLSYPDEECN EACLEGCFCP PGLYMDERGD |
| 701 | CVPKAQCPCY YDGEIFQPED IFSDHHTMCY CEDGFMHCTM SGVPGSLLPD |
| 751 | AVLSSPLSHR SKRSLSCRPP MVKLVCPADN LRAEGLECTK TCQNYDLECM |
| 801 | SMGCVSGCLC PPGMVRHENR CVALERCPCF HQGKEYAPGE TVKIGCNTCV |
| 851 | CRDRKWNCTD HVCDATCSTI GMAHYLTFDG LKYLFPGECQ YVLVQDYCGS |
| 901 | NPGTFRILVG NKGCSHPSVK CKKRVTILVE GGEIELFDGE VNVKRPMKDE |
| 951 | THFEVVESGR YIILLLGKAL SVVWDRHLSI SVVLKQTYQE KVCGLCGNFD |
| 1001 | GIQNNDLTSS NLQVEEDPVD FGNSWKVSSQ CADTRKVPLD SSPATCHNNI |
| 1051 | MKQTMVDSSC RILTSDVFQD CNKLVDPEPY LDVCIYDTCS CESIGDCAAF |
| 1101 | CDTIAAYAHV CAQHGKVVTW RTATLCPQSC EERNLRENGY EAEWRYNSCA |
| 1151 | PACQVTCQHP EPLACPVQCV EGCHAHCPPG KILDELLQTC VDPEDCPVCE |
| 1201 | VAGRRFASGK KVTLNPSDPE HCQICHCDVV NLTCEACQEP ISGAPTSESA |
| 1251 | TPESGPGSEP ATSGSETPGT SESATPESGP GSEPATSGSE TPGTSESATP |
| 1301 | ESGPGTSTEP SEGSAPGSPA GSPTSTEEGT SESATPESGP GSEPATSGSE |
| 1351 | TPGTSESATP ESGPGSPAGS PTSTEEGSPA GSPTSTEEGA SSDKTHTCPP |
| 1401 | CPAPELLGGP SVFLFPPKPK DTLMISRTPE VTCVVVDVSH EDPEVKFNWY |
| 1451 | VDGVEVHNAK TKPREEQYNS TYRVVSVLTV LHQDWLNGKE YKCKVSNKAL |
| 1501 | PAPIEKTISK AKGQPREPQV YTLPPSRDEL TKNQVSLTCL VKGFYPSDIA |
| 1551 | VEWESNGQPE NNYKTTPPVL DSDGSFFLYS KLTVDKSRWQ QGNVFSCSVM |
| 1601 | HEALHNHYTQ KSLSLSPGK* |

pSYN VWF073 Nucleotide Sequence—(Encoding VWFD1D2D′D3-144 AE XTEN-FVIII Truncated a2 Thrombin Site-Fc) (SEQ ID NO:174)

| | |
|---|---|
| 1 | ATGATTCCTG CCAGATTTGC CGGGGTGCTG CTTGCTCTGG CCCTCATTTT |
| 51 | GCCAGGGACC CTTTGTGCAG AAGGAACTCG CGGCAGGTCA TCCACGGCCC |
| 101 | GATGCAGCCT TTTCGGAAGT GACTTCGTCA ACACCTTTGA TGGGAGCATG |
| 151 | TACAGCTTTG CGGGATACTG CAGTTACCTC CTGGCAGGGG GCTGCCAGAA |
| 201 | ACGCTCCTTC TCGATTATTG GGGACTTCCA GAATGGCAAG AGAGTGAGCC |
| 251 | TCTCCGTGTA TCTTGGGGAA TTTTTTGACA TCCATTTGTT TGTCAATGGT |
| 301 | ACCGTGACAC AGGGGGACCA AAGAGTCTCC ATGCCCTATG CCTCCAAAGG |
| 351 | GCTGTATCTA GAAACTGAGG CTGGGTACTA CAAGCTGTCC GGTGAGGCCT |
| 401 | ATGGCTTTGT GGCCAGGATC GATGGCAGCG GCAACTTTCA AGTCCTGCTG |
| 451 | TCAGACAGAT ACTTCAACAA GACCTGCGGG CTGTGTGGCA ACTTTAACAT |
| 501 | CTTTGCTGAA GATGACTTTA TGACCCAAGA AGGGACCTTG ACCTCGGACC |
| 551 | CTTATGACTT TGCCAACTCA TGGGCTCTGA GCAGTGGAGA ACAGTGGTGT |
| 601 | GAACGGGCAT CTCCTCCCAG CAGCTCATGC AACATCTCCT CTGGGGAAAT |
| 651 | GCAGAAGGGC CTGTGGGAGC AGTGCCAGCT TCTGAAGAGC ACCTCGGTGT |
| 701 | TTGCCCGCTG CCACCCTCTG GTGGACCCCG AGCCTTTTGT GGCCCTGTGT |
| 751 | GAGAAGACTT TGTGTGAGTG TGCTGGGGGG CTGGAGTGCG CCTGCCCTGC |
| 801 | CCTCCTGGAG TACGCCCGGA CCTGTGCCCA GGAGGGAATG GTGCTGTACG |
| 851 | GCTGGACCGA CCACAGCGCG TGCAGCCCAG TGTGCCCTGC TGGTATGGAG |
| 901 | TATAGGCAGT GTGTGTCCCC TTGCGCCAGG ACCTGCCAGA GCCTGCACAT |
| 951 | CAATGAAATG TGTCAGGAGC GATGCGTGGA TGGCTGCAGC TGCCCTGAGG |
| 1001 | GACAGCTCCT GGATGAAGGC CTCTGCGTGG AGAGCACCGA GTGTCCCTGC |
| 1051 | GTGCATTCCG GAAAGCGCTA CCCTCCCGGC ACCTCCCTCT CTCGAGACTG |
| 1101 | CAACACCTGC ATTTGCCGAA ACAGCCAGTG GATCTGCAGC AATGAAGAAT |
| 1151 | GTCCAGGGGA GTGCCTTGTC ACTGGTCAAT CCCACTTCAA GAGCTTTGAC |
| 1201 | AACAGATACT TCACCTTCAG TGGGATCTGC CAGTACCTGC TGGCCCGGGA |
| 1251 | TTGCCAGGAC CACTCCTTCT CCATTGTCAT TGAGACTGTC CAGTGTGCTG |
| 1301 | ATGACCGCGA CGCTGTGTGC ACCCGCTCCG TCACCGTCCG GCTGCCTGGC |
| 1351 | CTGCACAACA GCCTTGTGAA ACTGAAGCAT GGGGCAGGAG TTGCCATGGA |
| 1401 | TGGCCAGGAC ATCCAGCTCC CCCTCCTGAA AGGTGACCTC CGCATCCAGC |
| 1451 | ATACAGTGAC GGCCTCCGTG CGCCTCAGCT ACGGGGAGGA CCTGCAGATG |
| 1501 | GACTGGGATG GCCGCGGGAG GCTGCTGGTG AAGCTGTCCC CCGTCTATGC |
| 1551 | CGGGAAGACC TGCGGCCTGT GTGGGAATTA CAATGGCAAC CAGGGCGACG |
| 1601 | ACTTCCTTAC CCCCTCTGGG CTGGCGGAGC CCCGGGTGGA GGACTTCGGG |
| 1651 | AACGCCTGGA AGCTGCACGG GGACTGCCAG GACCTGCAGA AGCAGCACAG |
| 1701 | CGATCCCTGC GCCCTCAACC CGCGCATGAC CAGGTTCTCC GAGGAGGCGT |
| 1751 | GCGCGGTCCT GACGTCCCCC ACATTCGAGG CCTGCCATCG TGCCGTCAGC |
| 1801 | CCGCTGCCCT ACCTGCGGAA CTGCCGCTAC GACGTGTGCT CCTGCTCGGA |
| 1851 | CGGCCGCGAG TGCCTGTGCG GCGCCCTGGC CAGCTATGCC GCGGCCTGCG |
| 1901 | CGGGGAGAGG CGTGCGCGTC GCGTGGCGCG AGCCAGGCCG CTGTGAGCTG |
| 1951 | AACTGCCCGA AAGGCCAGGT GTACCTGCAG TGCGGGACCC CCTGCAACCT |
| 2001 | GACCTGCCGC TCTCTCTCTT ACCCGGATGA GGAATGCAAT GAGGCCTGCC |
| 2051 | TGGAGGGCTG CTTCTGCCCC CCAGGGCTCT ACATGGATGA GAGGGGGGAC |
| 2101 | TGCGTGCCCA AGGCCCAGTG CCCCTGTTAC TATGACGGTG AGATCTTCCA |
| 2151 | GCCAGAAGAC ATCTTCTCAG ACCATCACAC CATGTGCTAC TGTGAGGATG |
| 2201 | GCTTCATGCA CTGTACCATG AGTGGAGTCC CCGGAAGCTT GCTGCCTGAC |
| 2251 | GCTGTCCTCA GCAGTCCCCT GTCTCATCGC AGCAAAAGGA GCCTATCCTG |
| 2301 | TCGGCCCCCC ATGGTCAAGC TGGTGTGTCC CGCTGACAAC CTGCGGGCTG |
| 2351 | AAGGGCTCGA GTGTACCAAA ACGTGCCAGA ACTATGACCT GGAGTGCATG |
| 2401 | AGCATGGGCT GTGTCTCTGG CTGCCTCTGC CCCCCGGGCA TGGTCCGGCA |
| 2451 | TGAGAACAGA TGTGTGGCCC TGGAAAGGTG TCCCTGCTTC CATCAGGGCA |
| 2501 | AGGAGTATGC CCCTGGAGAA ACAGTGAAGA TTGGCTGCAA CACTTGTGTC |
| 2551 | TGTCGGGACC GGAAGTGGAA CTGCACAGAC CATGTGTGTG ATGCCACGTG |
| 2601 | CTCCACGATC GGCATGGCCC ACTACCTCAC CTTCGACGGG CTCAAATACC |
| 2651 | TGTTCCCCGG GGAGTGCCAG TACGTTCTGG TGCAGGATTA CTGCGGCAGT |
| 2701 | AACCCTGGGA CCTTTCGGAT CCTAGTGGGG AATAAGGGAT GCAGCCACCC |
| 2751 | CTCAGTGAAA TGCAAGAAAC GGGTCACCAT CCTGGTGGAG GGAGGAGAGA |
| 2801 | TTGAGCTGTT TGACGGGGAG GTGAATGTGA AGAGGCCCAT GAAGGATGAG |
| 2851 | ACTCACTTTG AGGTGGTGGA GTCTGGCCGG TACATCATTC TGCTGCTGGG |
| 2901 | CAAAGCCCTC TCCGTGGTCT GGGACCGCCA CCTGAGCATC TCCGTGGTCC |
| 2951 | TGAAGCAGAC ATACCAGGAG AAAGTGTGTG GCCTGTGTGG GAATTTTGAT |
| 3001 | GGCATCCAGA ACAATGACCT CACCAGCAGC AACCTCCAAG TGGAGGAAGA |
| 3051 | CCCTGTGGAC TTTGGGAACT CCTGGAAAGT GAGCTCGCAG TGTGCTGACA |
| 3101 | CCAGAAAAGT GCCTCTGGAC TCATCCCCTG CCACCTGCCA TAACAACATC |
| 3151 | ATGAAGCAGA CGATGGTGGA TTCCTCCTGT AGAATCCTTA CCAGTGACGT |
| 3201 | CTTCCAGGAC TGCAACAAGC TGGTGGACCC CGAGCCATAT CTGGATGTCT |
| 3251 | GCATTTACGA CACCTGCTCC TGTGAGTCCA TTGGGGACTG CGCCGCATTC |
| 3301 | TGCGACACCA TTGCTGCCTA TGCCCACGTG TGTGCCCAGC ATGGCAAGGT |
| 3351 | GGTGACCTGG AGGACGGCCA CATTGTGCCC CCAGAGCTGC GAGGAGAGGA |
| 3401 | ATCTCCGGGA GAACGGGTAT GAGGCTGAGT GGCGCTATAA CAGCTGTGCA |
| 3451 | CCTGCCTGTC AAGTCACGTG TCAGCACCCT GAGCCACTGG CCTGCCCTGT |
| 3501 | GCAGTGTGTG GAGGGCTGCC ATGCCCACTG CCCTCCAGGG AAAATCCTGG |
| 3551 | ATGAGCTTTT GCAGACCTGC GTTGACCCTG AAGACTGTCC AGTGTGTGAG |
| 3601 | GTGGCTGGCC GGCGTTTTGC CTCAGGAAAG AAAGTCACCT TGAATCCCAG |
| 3651 | TGACCCTGAG CACTGCCAGA TTTGCCACTG TGATGTTGTC AACCTCACCT |
| 3701 | GTGAAGCCTG CCAGGAGCCG GGCGCGCCAA CATCAGAGAG CGCCACCCCT |
| 3751 | GAAAGTGGTC CCGGGAGCGA GCCAGCCACA TCTGGGTCGG AAACGCCAGG |
| 3801 | CACAAGTGAG TCTGCAACTC CCGAGTCCGG ACCTGGCTCC GAGCCTGCCA |
| 3851 | CTAGCGGCTC CGAGACTCCG GGAACTTCCG AGAGCGCTAC ACCAGAAAGC |
| 3901 | GGACCCGGAA CCAGTACCGA ACCTAGCGAG GGCTCTGCTC CGGGCAGCCC |
| 3951 | AGCCGGCTCT CCTACATCCA CGGAGGAGGG CACTTCCGAA TCCGCCACCC |
| 4001 | CGGAGTCAGG GCCAGGATCT GAACCCGCTA CCTCAGGCAG TGAGACGCCA |
| 4051 | GGAACGAGCG AGTCCGCTAC ACCGGAGAGT GGGCCAGGGA GCCCTGCTGG |
| 4101 | ATCTCCTACG TCCACTGAGG AAGGGTCACC AGCGGGCTCG CCCACCAGCA |
| 4151 | CTGAAGAAGG TGCCTCGAGC GGCGGTGGAG GATCCGGTGG CGGGGGATCC |
| 4201 | GGTGGCGGGG GATCCGGTGG CGGGGGATCC GGTGGCGGGG GATCCGGTGG |
| 4251 | CGGGGGATCC ATTGAACCAA GAAGCTTCTC TGGCAGCGGA GGCGACAAAA |
| 4301 | CTCACACATG CCCACCGTGC CCAGCTCCAG AACTCCTGGG CGGACCGTCA |
| 4351 | GTCTTCCTCT TCCCCCCAAA ACCCAAGGAC ACCCTCATGA TCTCCCGGAC |
| 4401 | CCCTGAGGTC ACATGCGTGG TGGTGGACGT GAGCCACGAA GACCCTGAGG |
| 4451 | TCAAGTTCAA CTGGTACGTG GACGGCGTGG AGGTGCATAA TGCCAAGACA |
| 4501 | AAGCCGCGGG AGGAGCAGTA CAACAGCACG TACCGTGTGG TCAGCGTCCT |
| 4551 | CACCGTCCTG CACCAGGACT GGCTGAATGG CAAGGAGTAC AAGTGCAAGG |
| 4601 | TCTCCAACAA AGCCCTCCCA GCCCCCATCG AGAAAACCAT CTCCAAAGCC |
| 4651 | AAAGGGCAGC CCCGAGAACC ACAGGTGTAC ACCCTGCCCC CATCCCGGGA |
| 4701 | TGAGCTGACC AAGAACCAGG TCAGCCTGAC CTGCCTGGTC AAAGGCTTCT |
| 4751 | ATCCCAGCGA CATCGCCGTG GAGTGGGAGA GCAATGGGCA GCCGGAGAAC |
| 4801 | AACTACAAGA CCACGCCTCC CGTGTTGGAC TCCGACGGCT CCTTCTTCCT |
| 4851 | CTACAGCAAG CTCACCGTGG ACAAGAGCAG GTGGCAGCAG GGGAACGTCT |
| 4901 | TCTCATGCTC CGTGATGCAT GAGGCTCTGC ACAACCACTA CACGCAGAAG |
| 4951 | AGCCTCTCCC TGTCTCCGGG TAAATGA |

pSYN VWF073 Protein Sequence— (VWFD1D2D′D3-144 AE XTEN-Truncated a2 Thrombin Site-Fc) (SEQ ID NO:175)

| | |
|---|---|
| 1 | MIPARFAGVL LALALILPGT LCAEGTRGRS STARCSLFGS DFVNTFDGSM |
| 51 | YSFAGYCSYL LAGGCQKRSF SIIGDFQNGK RVSLSVYLGE FFDIHLFVNG |
| 101 | TVTQGDQRVS MPYASKGLYL ETEAGYYKLS GEAYGFVARI DGSGNFQVLL |
| 151 | SDRYFNKTCG LCGNFNIFAE DDFMTQEGTL TSDPYDFANS WALSSGEQWC |
| 201 | ERASPPSSSC NISSGEMQKG LWEQCQLLKS TSVFARCHPL VDPEPFVALC |
| 251 | EKTLCECAGG LECACPALLE YARTCAQEGM VLYGWTDHSA CSPVCPAGME |
| 301 | YRQCVSPCAR TCQSLHINEM CQERCVDGCS CPEGQLLDEG LCVESTECPC |
| 351 | VHSGKRYPPG TSLSRDCNTC ICRNSQWICS NEECPGECLV TGQSHFKSFD |
| 401 | NRYFTFSGIC QYLLARDCQD HSFSIVIETV QCADDRDAVC TRSVTVRLPG |
| 451 | LHNSLVKLKH GAGVAMDGQD IQLPLLKGDL RIQHTVTASV RLSYGEDLQM |
| 501 | DWDGRGRLLV KLSPVYAGKT CGLCGNYNGN QGDDFLTPSG LAEPRVEDFG |
| 551 | NAWKLHGDCQ DLQKQHSDPC ALNPRMTRFS EEACAVLTSP TFEACHRAVS |
| 601 | PLPYLRNCRY DVCSCSDGRE CLCGALASYA AACAGRGVRV AWREPGRCEL |
| 651 | NCPKGQVYLQ CGTPCNLTCR SLSYPDEECN EACLEGCFCP PGLYMDERGD |
| 701 | CVPKAQCPCY YDGEIFQPED IFSDHHTMCY CEDGFMHCTM SGVPGSLLPD |
| 751 | AVLSSPLSHR SKRSLSCRPP MVKLVCPADN LRAEGLECTK TCQNYDLECM |
| 801 | SMGCVSGCLC PPGMVRHENR CVALERCPCF HQGKEYAPGE TVKIGCNTCV |
| 851 | CRDRKWNCTD HVCDATCSTI GMAHYLTFDG LKYLFPGECQ YVLVQDYCGS |
| 901 | NPGTFRILVG NKGCSHPSVK CKKRVTILVE GGEIELFDGE VNVKRPMKDE |
| 951 | THFEVVESGR YIILLLGKAL SVVWDRHLSI SVVLKQTYQE KVCGLCGNFD |
| 1001 | GIQNNDLTSS NLQVEEDPVD FGNSWKVSSQ CADTRKVPLD SSPATCHNNI |
| 1051 | MKQTMVDSSC RILTSDVFQD CNKLVDPEPY LDVCIYDTCS CESIGDCAAF |
| 1101 | CDTIAAYAHV CAQHGKVVTW RTATLCPQSC EERNLRENGY EAEWRYNSCA |
| 1151 | PACQVTCQHP EPLACPVQCV EGCHAHCPPG KILDELLQTC VDPEDCPVCE |
| 1201 | VAGRRFASGK KVTLNPSDPE HCQICHCDVV NLTCEACQEP GAPTSESATP |
| 1251 | ESGPGSEPAT SGSETPGTSE SATPESGPGS EPATSGSETP GTSESATPES |
| 1301 | GPGTSTEPSE GSAPGSPAGS PTSTEEGTSE SATPESGPGS EPATSGSETP |
| 1351 | GTSESATPES GPGSPAGSPT STEEGSPAGS PTSTEEGASS GGGGSGGGGS |
| 1401 | GGGGSGGGGS GGGGSGGGGS IEPRSFSGSG GDKTHTCPPC PAPELLGGPS |
| 1451 | VFLFPPKPKD TLMISRTPEV TCVVVDVSHE DPEVKFNWYV DGVEVHNAKT |
| 1501 | KPREEQYNST YRVVSVLTVL HQDWLNGKEY KCKVSNKALP APIEKTISKA |
| 1551 | KGQPREPQVY TLPPSRDELT KNQVSLTCLV KGFYPSDIAV EWESNGQPEN |
| 1601 | NYKTTPPVLD SDGSFFLYSK LTVDKSRWQQ GNVFSCSVMH EALHNHYTQK |
| 1651 | SLSLSPGK* |

[0383] The foregoing description of the specific embodiments will so fully reveal the general nature of the invention that others can, by applying knowledge within the skill of the art, readily modify and/or adapt for various applications such specific embodiments, without undue experimentation, without departing from the general concept of the present invention. Therefore, such adaptations and modifications are intended to be within the meaning and range of equivalents of the disclosed embodiments, based on the teaching and guidance presented herein. It is to be understood that the phraseology or terminology herein is for the purpose of description and not of limitation, such that the terminology or phraseology of the present specification is to be interpreted by the skilled artisan in light of the teachings and guidance.

[0384] Other embodiments of the invention will be apparent to those skilled in the art from consideration of the specification and practice of the invention disclosed herein. It is intended that the specification and examples be considered as exemplary only, with a true scope and spirit of the invention being indicated by the following claims.

[0385] All patents and publications cited herein are incorporated by reference herein in their entirety.

1. A chimeric protein comprising (i) a first polypeptide which comprises a Factor VIII (“FVIII”) protein fused to a first immunoglobulin (“Ig”) constant region or a portion thereof and (ii) a second polypeptide which comprises a von Willebrand Factor (“VWF”) protein comprising a D′ domain and a D3 domain of VWF fused to a second Ig constant region or a portion thereof by an XTEN sequence in between, wherein the XTEN sequence of the second polypeptide contains less than 288 amino acid residues, and wherein the first polypeptide is linked to or associated with the second polypeptide.

2-5. (canceled)

6. The chimeric protein of claim 1, wherein the XTEN sequence of the second polypeptide contains about 36, about 42, about 72, or about 144 amino acids.

7. The chimeric protein of claim 6, wherein the XTEN sequence of the second polypeptide is selected from AE42, AE72, AE144, AG42, AG72, AG144, SEQ ID NO: 9, SEQ ID NO: 10, SEQ ID NO: 11, SEQ ID NO: 55, SEQ ID NO: 56, SEQ ID NO: 57, SEQ ID NO: 58, SEQ ID NO: 59, SEQ ID NO: 14, SEQ ID NO: 60, SEQ ID NO: 61, SEQ ID NO: 62, and SEQ ID NO: 63.

8. The chimeric protein of claim 7, wherein the XTEN sequence of the second polypeptide is SEQ ID NO: 58.

9-10. (canceled)

11. The chimeric protein of claim 1, wherein the first polypeptide further comprises a second XTEN sequence which is inserted at one or more insertion sites within the FVIII protein.

12. (canceled)

13. The chimeric protein of claim 11, wherein the second XTEN sequence is selected from AE42, AE72, AE864, AE576, AE288, AE144, AG864, AG576, AG288, AG144, SEQ ID NO: 8; SEQ ID NO: 9, SEQ ID NO: 10, SEQ ID NO: 11, SEQ ID NO: 17; SEQ ID NO: 54; SEQ ID NO: 19; SEQ ID NO: 16; SEQ ID NO: 18; SEQ ID NO: 15; SEQ ID NO: 55; SEQ ID NO: 56; SEQ ID NO: 57; SEQ ID NO: 58; SEQ ID NO: 59; SEQ ID NO: 14; SEQ ID NO: 60; SEQ ID NO: 61; SEQ ID NO: 62; and SEQ ID NO: 63.

14. The chimeric protein of claim 13, wherein the second XTEN sequence is SEQ ID NO: 8.

15. (canceled)

16. The chimeric protein of claim 1, wherein the XTEN sequence in the second polypeptide is fused to the second Ig constant region or a portion thereof by a linker.

17. The chimeric protein of claim 16, wherein the linker is a cleavable linker.

18. (canceled)

19. The chimeric protein of claim 16, wherein the linker is cleavable by factor IIa (thrombin).

20. The chimeric protein of claim 17, wherein the linker comprises one or more cleavage sites comprising an amino acid sequence selected from RRRR (SEQ ID NO: 102), RKRRKR (SEQ ID NO: 103), RRRRS (SEQ ID NO: 104), TQSFNDFTR (SEQ ID NO: 2), SVSQTSKLTR (SEQ ID NO: 3), DFLAEGGGVR (SEQ ID NO: 4), TTKIKPR (SEQ ID NO: 5), LVPRG (SEQ ID NO: 6), ALRPR (SEQ ID NO: 7), KLTRAET (SEQ ID NO: 121), DFTRVVG (SEQ ID NO: 122), TMTRIVGG (SEQ ID NO: 123), SPFRSTGG (SEQ ID NO: 124), LQVRIVGG (SEQ ID NO: 125), PLGRIVGG (SEQ ID NO: 126), IEGRTVGG (SEQ ID NO: 127), LTPRSLLV (SEQ ID NO: 128), LGPVSGVP (SEQ ID NO: 129), VAGDSLEE (SEQ ID NO: 130), GPAGLGGA (SEQ ID NO: 131), GPAGLRGA (SEQ ID NO: 132), APLGLRLR (SEQ ID NO: 133), PALPLVAQ (SEQ ID NO: 134), ENLYFQG (SEQ ID NO: 135), DDDKIVGG (SEQ ID NO: 136), LEVLFQGP (SEQ ID NO: 137), and LPKTGSES (SEQ ID NO: 138).

21. The chimeric protein of claim 17, wherein the linker comprises an amino acid sequence selected from IEPR (SEQ ID NO: 200) and IEPRSFS (SEQ ID NO: 194).

22. (canceled)

23. The chimeric protein of claim 1, wherein the first Ig constant region or a portion thereof comprises a first Fc region and/or the second Ig constant region or a portion thereof comprises a second Fc region.

24-26. (canceled)

27. The chimeric protein of claim 1, wherein the first Ig constant region or a portion thereof is associated with the second Ig constant region or a portion thereof.

28. The chimeric protein of claim 1, wherein the first Ig constant region or a portion thereof is associated with the second Ig constant region or a portion thereof by a covalent bond.

29. (canceled)

30. The chimeric protein claim 1, comprising a formula:
wherein V is the VWF protein, which comprises a D′ domain and a D3 domain,
X or X1 is the XTEN sequence that contains less than 288 amino acids,
X2 is a second XTEN sequence,
FVIII(X2) comprises a FVIII protein having the second XTEN sequence inserted in one or more insertion sites within the FVIII protein,
F1 is the first Ig constant region or a portion thereof,
F2 is the second Ig constant region or a portion thereof,
L1 and L2 are optional linkers,
(-) is a peptide bond; and
(:) is a covalent bond or a non-covalent bond.

31-70. (canceled)

71. The chimeric protein of claim 11, wherein the one or more insertion sites in the FVIII protein are located immediately downstream of amino acid 745 corresponding to the mature FVIII protein (SEQ ID NO: 65).

72-78. (canceled)

79. The chimeric protein of claim 1, wherein the FVIII protein comprises B domain or a portion thereof.

80. The chimeric protein of claim 79, wherein the FVIII protein comprises a deletion of amino acids 746-1648 corresponding to the mature FVIII protein (SEQ ID NO: 65).

81-87. (canceled)

88. The chimeric protein of claim 1, wherein the VWF protein comprises an amino acid sequence at least 90% identical to amino acids 764 to 1240 of SEQ ID NO: 21.

89-90. (canceled)

91. The chimeric protein of claim 1, wherein the VWF protein contains an amino acid other than cysteine substituted for a residue corresponding to residue 1099, residue 1142, or both residues 1099 and 1142 of SEQ ID NO: 21.

92-144. (canceled)

145. A chimeric protein comprising:
(i) a first polypeptide which comprises a Factor VIII (“FVIII”) protein fused to a first immunoglobulin (“Ig”) constant region or a portion thereof, wherein the FVIII protein comprises an XTEN sequence inserted immediately downstream of amino acid 745 corresponding to the mature FVIII protein (SEQ ID NO: 65) and wherein the XTEN sequence comprises SEQ ID NO: 8; and
(ii) a second polypeptide which comprises a von Willebrand Factor (“VWF”) protein comprising a D′ domain and a D3 domain of VWF fused to a second Ig constant region or a portion thereof by an XTEN sequence in-between, wherein the XTEN sequence in the second polypeptide comprises SEQ ID NO: 58 and is linked to the second Ig constant region by a linker sequence comprising SEQ ID NO: 88;
wherein the first polypeptide is linked to or associated with the second polypeptide through the first and second Ig constant regions.

146-147. (canceled)

148. The chimeric protein of claim 145, wherein the FVIII protein comprising the XTEN sequence comprises an amino acid sequence comprising SEQ ID NO: 202, and wherein the VWF protein comprises an amino acid sequence comprising SEQ ID NO: 201.

149. (canceled)

150. A polynucleotide or a set of polynucleotides encoding the chimeric protein of claim 1.

151. A vector or a set of vectors comprising the polynucleotide or the set of polynucleotides of claim 150 and one or more promoters operably linked to the polynucleotide or the set of polynucleotides.

152. A host cell comprising the polynucleotide or the set of polynucleotides of claim 150.

153. A pharmaceutical composition comprising the chimeric protein claim 1 and a pharmaceutically acceptable carrier.

154. A method of treating a bleeding disease or condition in a subject in need thereof comprising administering to the subject the chimeric protein of claim 1.

155. A method of treating a bleeding disease or condition in a subject in need thereof comprising administering to the subject the polynucleotide or the set of polynucleotides of claim 150.

The application's sequence listing, which the Patent Office published only in electronic form, follows.

SEQUENCE LISTING (200 sequences)

SEQ ID NO: 1 - protein, 9 aa, Artificial Sequence
  Linker
TQSFNDFTR

SEQ ID NO: 2 - protein, 302 aa, Artificial Sequence
  pSYN FVIII 312A
PRSFSQNGTSESATPESGPGSEPATSGSETPGTSESATPESGPGSEPATSGSETPGTSESATPESGPGTSTEPSEGSAPGSPAGSPTSTEEGTSESATPESGPGSEPATSGSETPGTSESATPESGPGSPAGSPTSTEEGSPAGSPTSTEEGTSTEPSEGSAPGTSESATPESGPGTSESATPESGPGTSESATPESGPGSEPATSGSETPGSEPATSGSETPGSPAGSPTSTEEGTSTEPSEGSAPGTSTEPSEGSAPGSEPATSGSETPGTSESATPESGPGTSTEPSEGSAPASSEITR

SEQ ID NO: 3 - protein, 10 aa, Artificial Sequence
  Linker
SVSQTSKLTR

SEQ ID NO: 4 - protein, 10 aa, Artificial Sequence
  Linker
DFLAEGGGVR

SEQ ID NO: 5 - protein, 7 aa, Artificial Sequence
  Linker
TTKIKPR

SEQ ID NO: 6 - protein, 5 aa, Artificial Sequence
  Linker
LVPRG

SEQ ID NO: 7 - protein, 5 aa, Artificial Sequence
  Linker
ALRPR

SEQ ID NO: 8 - protein, 288 aa, Artificial Sequence
  XTEN AE288
GTSESATPESGPGSEPATSGSETPGTSESATPESGPGSEPATSGSETPGTSESATPESGPGTSTEPSEGSAPGSPAGSPTSTEEGTSESATPESGPGSEPATSGSETPGTSESATPESGPGSPAGSPTSTEEGSPAGSPTSTEEGTSTEPSEGSAPGTSESATPESGPGTSESATPESGPGTSESATPESGPGSEPATSGSETPGSEPATSGSETPGSPAGSPTSTEEGTSTEPSEGSAPGTSTEPSEGSAPGSEPATSGSETPGTSESATPESGPGTSTEPSEGSAP

SEQ ID NO: 9 - protein, 42 aa, Artificial Sequence
  XTEN AE42
GAPGSPAGSPTSTEEGTSESATPESGPGSEPATSGSETPASS

SEQ ID NO: 10 - protein, 78 aa, Artificial Sequence
  XTEN AE72
GAPTSESATPESGPGSEPATSGSETPGTSESATPESGPGSEPATSGSETPGTSESATPESGPGTSTEPSEGSAPGASS

SEQ ID NO: 11 - protein, 143 aa, Artificial Sequence
  XTEN AE144
GSEPATSGSETPGTSESATPESGPGSEPATSGSETPGSPAGSPTSTEEGTSTEPSEGSAPGSEPATSGSETPGSEPATSGSETPGSEPATSGSETPGTSTEPSEGSAPGTSESAPESGPGSEPATSGSETPGTSTEPSEGSAP

SEQ ID NO: 12 - protein, 56 aa, Artificial Sequence
  pSYN VWF057
TSTEEGASSGGGGSGGGGSGGGGSGGGGSGGGGSGGGGSGGGGSLVPRGSGGDKTH

SEQ ID NO: 13 - protein, 46 aa, Artificial Sequence
  pSYN VWF059
TSTEEGASISDKNTGDYYEDSYEDISAYLLSKNNAIEPRSFSDKTH

SEQ ID NO: 14 - protein, 144 aa, Artificial Sequence
  XTEN AG144
GTPGSGTASSSPGSSTPSGATGSPGSSPSASTGTGPGSSPSASTGTGPGASPGTSSTGSPGASPGTSSTGSPGSSTPSGATGSPGSSPSASTGTGPGASPGTSSTGSPGSSPSASTGTGPGTPGSGTASSSPGSSTPSGATGSP

SEQ ID NO: 15 - protein, 864 aa, Artificial Sequence
  XTEN AE864
GSPAGSPTSTEEGTSESATPESGPGTSTEPSEGSAPGSPAGSPTSTEEGTSTEPSEGSAPGTSTEPSEGSAPGTSESATPESGPGSEPATSGSETPGSEPATSGSETPGSPAGSPTSTEEGTSESATPESGPGTSTEPSEGSAPGTSTEPSEGSAPGSPAGSPTSTEEGTSTEPSEGSAPGTSTEPSEGSAPGTSESATPESGPGTSTEPSEGSAPGTSESATPESGPGSEPATSGSETPGTSTEPSEGSAPGTSTEPSEGSAPGTSESATPESGPGTSESATPESGPGSPAGSPTSTEEGTSESATPESGPGSEPATSGSETPGTSESATPESGPGTSTEPSEGSAPGTSTEPSEGSAPGTSTEPSEGSAPGTSTEPSEGSAPGTSTEPSEGSAPGTSTEPSEGSAPGSPAGSPTSTEEGTSTEPSEGSAPGTSESATPESGPGSEPATSGSETPGTSESATPESGPGSEPATSGSETPGTSESATPESGPGTSTEPSEGSAPGTSESATPESGPGSPAGSPTSTEEGSPAGSPTSTEEGSPAGSPTSTEEGTSESATPESGPGTSTEPSEGSAPGTSESATPESGPGSEPATSGSETPGTSESATPESGPGSEPATSGSETPGTSESATPESGPGTSTEPSEGSAPGSPAGSPTSTEEGTSESATPESGPGSEPATSGSETPGTSESATPESGPGSPAGSPTSTEEGSPAGSPTSTEEGTSTEPSEGSAPGTSESATPESGPGTSESATPESGPGTSESATPESGPGSEPATSGSETPGSEPATSGSETPGSPAGSPTSTEEGTSTEPSEGSAPGTSTEPSEGSAPGSEPATSGSETPGTSESATPESGPGTSTEPSEGSAP

SEQ ID NO: 16 - protein, 576 aa, Artificial Sequence
  XTEN AE576
GSPAGSPTSTEEGTSESATPESGPGTSTEPSEGSAPGSPAGSPTSTEEGTSTEPSEGSAPGTSTEPSEGSAPGTSESATPESGPGSEPATSGSETPGSEPATSGSETPGSPAGSPTSTEEGTSESATPESGPGTSTEPSEGSAPGTSTEPSEGSAPGSPAGSPTSTEEGTSTEPSEGSAPGTSTEPSEGSAPGTSESATPESGPGTSTEPSEGSAPGTSESATPESGPGSEPATSGSETPGTSTEPSEGSAPGTSTEPSEGSAPGTSESATPESGPGTSESATPESGPGSPAGSPTSTEEGTSESATPESGPGSEPATSGSETPGTSESATPESGPGTSTEPSEGSAPGTSTEPSEGSAPGTSTEPSEGSAPGTSTEPSEGSAPGTSTEPSEGSAPGTSTEPSEGSAPGSPAGSPTSTEEGTSTEPSEGSAPGTSESATPESGPGSEPATSGSETPGTSESATPESGPGSEPATSGSETPGTSESATPESGPGTSTEPSEGSAPGTSESATPESGPGSPAGSPTSTEEGSPAGSPTSTEEGSPAGSPTSTEEGTSESATPESGPGTSTEPSEGSAP

SEQ ID NO: 17 - protein, 864 aa, Artificial Sequence
  XTEN AG864
GASPGTSSTGSPGSSPSASTGTGPGSSPSASTGTGPGTPGSGTASSSPGSSTPSGATGSPGSSPSASTGTGPGASPGTSSTGSPGTPGSGTASSSPGSSTPSGATGSPGTPGSGTASSSPGASPGTSSTGSPGASPGTSSTGSPGTPGSGTASSSPGSSTPSGATGSPGASPGTSSTGSPGTPGSGTASSSPGSSTPSGATGSPGSSPSASTGTGPGSSPSASTGTGPGSSTPSGATGSPGSSTPSGATGSPGASPGTSSTGSPGASPGTSSTGSPGASPGTSSTGSPGTPGSGTASSSPGASPGTSSTGSPGASPGTSSTGSPGASPGTSSTGSPGSSPSASTGTGPGTPGSGTASSSPGASPGTSSTGSPGASPGTSSTGSPGASPGTSSTGSPGSSTPSGATGSPGSSTPSGATGSPGASPGTSSTGSPGTPGSGTASSSPGSSTPSGATGSPGSSTPSGATGSPGSSTPSGATGSPGSSPSASTGTGPGASPGTSSTGSPGASPGTSSTGSPGTPGSGTASSSPGASPGTSSTGSPGASPGTSSTGSPGASPGTSSTGSPGASPGTSSTGSPGTPGSGTASSSPGSSTPSGATGSPGTPGSGTASSSPGSSTPSGATGSPGTPGSGTASSSPGSSTPSGATGSPGSSTPSGATGSPGSSPSASTGTGPGSSPSASTGTGPGASPGTSSTGSPGTPGSGTASSSPGSSTPSGATGSPGSSPSASTGTGPGSSPSASTGTGPGASPGTSSTGSPGASPGTSSTGSPGSSTPSGATGSPGSSPSASTGTGPGASPGTSSTGSPGSSPSASTGTGPGTPGSGTASSSPGSSTPSGATGSPGSSTPSGATGSPGASPGTSSTGSP

SEQ ID NO: 18 - protein, 576 aa, Artificial Sequence
  XTEN AG576
PGTPGSGTASSSPGSSTPSGATGSPGSSPSASTGTGPGSSPSASTGTGPGSSTPSGATGSPGSSTPSGATGSPGASPGTSSTGSPGASPGTSSTGSPGASPGTSSTGSPGTPGSGTASSSPGASPGTSSTGSPGASPGTSSTGSPGASPGTSSTGSPGSSPSASTGTGPGTPGSGTASSSPGASPGTSSTGSPGASPGTSSTGSPGASPGTSSTGSPGSSTPSGATGSPGSSTPSGATGSPGASPGTSSTGSPGTPGSGTASSSPGSSTPSGATGSPGSSTPSGATGSPGSSTPSGATGSPGSSPSASTGTGPGASPGTSSTGSPGASPGTSSTGSPGTPGSGTASSSPGASPGTSSTGSPGASPGTSSTGSPGASPGTSSTGSPGASPGTSSTGSPGTPGSGTASSSPGSSTPSGATGSPGTPGSGTASSSPGSSTPSGATGSPGTPGSGTASSSPGSSTPSGATGSPGSSTPSGATGSPGSSPSASTGTGPGSSPSASTGTGPGASPGTSSTGSPGTPGSGTASSSPGSSTPSGATGSPGSSPSASTGTGPGSSPSASTGTGPGASPGTSSTGS

SEQ ID NO: 19 - protein, 288 aa, Artificial Sequence
  XTEN AG288
PGASPGTSSTGSPGASPGTSSTGSPGTPGSGTASSSPGSSTPSGATGSPGTPGSGTASSSPGSSTPSGATGSPGTPGSGTASSSPGSSTPSGATGSPGSSTPSGATGSPGSSPSASTGTGPGSSPSASTGTGPGASPGTSSTGSPGTPGSGTASSSPGSSTPSGATGSPGSSPSASTGTGPGSSPSASTGTGPGASPGTSSTGSPGASPGTSSTGSPGSSTPSGATGSPGSSPSASTGTGPGASPGTSSTGSPGSSPSASTGTGPGTPGSGTASSSPGSSTPSGATGS

SEQ ID NO: 20 - DNA, 8442 bp, Homo sapiens
atgattcctgccagatttgccggggtgctgcttgctctggccctcattttgccagggaccctttgtgcagaaggaactcgcggcaggtcatccacggcccgatgcagccttttcggaagtgacttcgtcaacacctttgatgggagcatgtacagctttgcgggatactgcagttacctcctggcagggggctgccagaaacgctccttctcgattattggggacttccagaatggcaagagagtgagcctctccgtgtatcttggggaattttttgacatccatttgtttgtcaatggtaccgtgacacagggggaccaaagagtctccatgccctatgcctccaaagggctgtatctagaaactgaggctgggtactacaagctgtccggtgaggcctatggctttgtggccaggatcgatggcagcggcaactttcaagtcctgctgtcagacagatacttcaacaagacctgcgggctgtgtggcaactttaacatctttgctgaagatgactttatgacccaagaagggaccttgacctcggacccttatgactttgccaactcatgggctctgagcagtggagaacagtggtgtgaacgggcatctcctcccagcagctcatgcaacatctcctctggggaaatgcagaagggcctgtgggagcagtgccagcttctgaagagcacctcggtgtttgcccgctgccaccctctggtggaccccgagccttttgtggccctgtgtgagaagactttgtgtgagtgtgctggggggctggagtgcgcctgccctgccctcctggagtacgcccggacctgtgcccaggagggaatggtgctgtacggctggaccgaccacagcgcgtgcagcccagtgtgccctgctggtatggagtataggcagtgtgtgtccccttgcgccaggacctgccagagcctgcacatcaatgaaatgtgtcaggagcgatgcgtggatggctgcagctgccctgagggacagctcctggatgaaggcctctgcgtggagagcaccgagtgtccctgcgtgcattccggaaagcgctaccctcccggcacctccctctctcgagactgcaacacctgcatttgccgaaacagccagtggatctgcagcaatgaagaatgtccaggggagtgccttgtcactggtcaatcccacttcaagagctttgacaacagatacttcaccttcagtgggatctgccagtacctgctggcccgggattgccaggaccactccttctccattgtcattgagactgtccagtgtgctgatgaccgcgacgctgtgtgcacccgctccgtcaccgtccggctgcctggcctgcacaacagccttgtgaaactgaagcatggggcaggagttgccatggatggccaggacatccagctccccctcctgaaaggtgacctccgcatccagcatacagtgacggcctccgtgcgcctcagctacggggaggacctgcagatggactgggatggccgcgggaggctgctggtgaagctgtcccccgtctatgccgggaagacctgcggcctgtgtgggaattacaatggcaaccagggcgacgacttccttaccccctctgggctggcrgagccccgggtggaggacttcgggaacgcctggaagctgcacggggactgccaggacctgcagaagcagcacagcgatccctgcgccctcaacccgcgcatgaccaggttctccgaggaggcgtgcgcggtcctgacgtcccccacattcgaggcctgccatcgtgccgtcagcccgctgccctacctgcggaactgccgctacgacgtgtgctcctgctcggacggccgcgagtgcctgtgcggcgccctggccagctatgccgcggcctgcgcggggagaggcgtgcgcgtcgcgtggcgcgagccaggccgctgtgagctgaactgcccgaaaggccaggtgtacctgcagtgcgggaccccctgcaacctgacctgccgctctctctcttacccggatgaggaatgcaatgaggcctgcctggagggctgcttctgccccccagggctctacatggatgagaggggggactgcgtgcccaaggcccagtgcccctgttactatgacggtgagatcttccagccagaagacatcttctcagaccatcacaccatgtgctactgtgaggatggcttcatgcactgtaccatgagtggagtccccggaagcttgctgcctgacgctgtcctcagcagtcccctgtctcatcgcagcaaaaggagcctatcctgtcggccccccatggtcaagctggtgtgtcccgctgacaacctgcgggctgaagggctcgagtgtaccaaaacgtgccagaactatgacctggagtgcatgagcatgggctgtgtctctggctgcctctgccccccgggcatggtccggcatgagaacagatgtgtggccctggaaaggtgtccctgcttccatcagggcaaggagtatgcccctggagaaacagtgaagattggctgcaacacttgtgtctgtcgggaccggaagtggaactgcacagaccatgtgtgtgatgccacgtgctccacgatcggcatggcccactacctcaccttcgacgggctcaaatacctgttccccggggagtgccagtacgttctggtgcaggattactgcggcagtaaccctgggacctttcggatcctagtggggaataagggatgcagccacccctcagtgaaatgcaagaaacgggtcaccatcctggtggagggaggagagattgagctgtttgacggggaggtgaatgtgaagaggcccatgaaggatgagactcactttgaggtggtggagtctggccggtacatcattctgctgctgggcaaagccctctccgtggtctgggaccgccacctgagcatctccgtggtcctgaagcagacataccaggagaaagtgtgtggcctgtgtgggaattttgatggcatccagaacaatgacctcaccagcagcaacctccaagtggaggaagaccctgtggactttgggaactcctggaaagtgagctcgcagtgtgctgacaccagaaaagtgcctctggactcatcccctgccacctgccataacaacatcatgaagcagacgatggtggattcctcctgtagaatccttaccagtgacgtcttccaggactgcaacaagctggtggaccccgagccatatctggatgtctgcatttacgacacctgctcctgtgagtccattggggactgcgcctgcttctgcgacaccattgctgcctatgcccacgtgtgtgcccagcatggcaaggtggtgacctggaggacggccacattgtgcccccagagctgcgaggagaggaatctccgggagaacgggtatgagtgtgagtggcgctataacagctgtgcacctgcctgtcaagtcacgtgtcagcaccctgagccactggcctgccctgtgcagtgtgtggagggctgccatgcccactgccctccagggaaaatcctggatgagcttttgcagacctgcgttgaccctgaagactgtccagtgtgtgaggtggctggccggcgttttgcctcaggaaagaaagtcaccttgaatcccagtgaccctgagcactgccagatttgccactgtgatgttgtcaacctcacctgtgaagcctgccaggagccgggaggcctggtggtgcctcccacagatgccccggtgagccccaccactctgtatgtggaggacatctcggaaccgccgttgcacgatttctactgcagcaggctactggacctggtcttcctgctggatggctcctccaggctgtccgaggctgagtttgaagtgctgaaggcctttgtggtggacatgatggagcggctgcgcatctcccagaagtgggtccgcgtggccgtggtggagtaccacgacggctcccacgcctacatcgggctcaaggaccggaagcgaccgtcagagctgcggcgcattgccagccaggtgaagtatgcgggcagccaggtggcctccaccagcgaggtcttgaaatacacactgttccaaatcttcagcaagatcgaccgccctgaagcctcccgcatcgccctgctcctgatggccagccaggagccccaacggatgtcccggaactttgtccgctacgtccagggcctgaagaagaagaaggtcattgtgatcccggtgggcattgggccccatgccaacctcaagcagatccgcctcatcgagaagcaggcccctgagaacaaggccttcgtgctgagcagtgtggatgagctggagcagcaaagggacgagatcgttagctacctctgtgaccttgcccctgaagcccctcctcctactctgccccccgacatggcacaagtcactgtgggcccggggctcttgggggtttcgaccctggggcccaagaggaactccatggttctggatgtggcgttcgtcctggaaggatcggacaaaattggtgaagccgacttcaacaggagcaaggagttcatggaggaggtgattcagcggatggatgtgggccaggacagcatccacgtcacggtgctgcagtactcctacatggtgaccgtggagtaccccttcagcgaggcacagtccaaaggggacatcctgcagcgggtgcgagagatccgctaccagggcggcaacaggaccaacactgggctggccctgcggtacctctctgaccacagcttcttggtcagccagggtgaccgggagcaggcgcccaacctggtctacatggtcaccggaaatcctgcctctgatgagatcaagaggctgcctggagacatccaggtggtgcccattggagtgggccctaatgccaacgtgcaggagctggagaggattggctggcccaatgcccctatcctcatccaggactttgagacgctcccccgagaggctcctgacctggtgctgcagaggtgctgctccggagaggggctgcagatccccaccctctcccctgcacctgactgcagccagcccctggacgtgatccttctcctggatggctcctccagtttcccagcttcttattttgatgaaatgaagagtttcgccaaggctttcatttcaaaagccaatatagggcctcgtctcactcaggtgtcagtgctgcagtatggaagcatcaccaccattgacgtgccatggaacgtggtcccggagaaagcccatttgctgagccttgtggacgtcatgcagcgggagggaggccccagccaaatcggggatgccttgggctttgctgtgcgatacttgacttcagaaatgcatggtgccaggccgggagcctcaaaggcggtggtcatcctggtcacggacgtctctgtggattcagtggatgcagcagctgatgccgccaggtccaacagagtgacagtgttccctattggaattggagatcgctacgatgcagcccagctacggatcttggcaggcccagcaggcgactccaacgtggtgaagctccagcgaatcgaagacctccctaccatggtcaccttgggcaattccttcctccacaaactgtgctctggatttgttaggatttgcatggatgaggatgggaatgagaagaggcccggggacgtctggaccttgccagaccagtgccacaccgtgacttgccagccagatggccagaccttgctgaagagtcatcgggtcaactgtgaccgggggctgaggccttcgtgccctaacagccagtcccctgttaaagtggaagagacctgtggctgccgctggacctgcccctgygtgtgcacaggcagctccactcggcacatcgtgacctttgatgggcagaatttcaagctgactggcagctgttcttatgtcctatttcaaaacaaggagcaggacctggaggtgattctccataatggtgcctgcagccctggagcaaggcagggctgcatgaaatccatcgaggtgaagcacagtgccctctccgtcgagstgcacagtgacatggaggtgacggtgaatgggagactggtctctgttccttacgtgggtgggaacatggaagtcaacgtttatggtgccatcatgcatgaggtcagattcaatcaccttggtcacatcttcacattcactccacaaaacaatgagttccaactgcagctcagccccaagacttttgcttcaaagacgtatggtctgtgtgggatctgtgatgagaacggagccaatgacttcatgctgagggatggcacagtcaccacagactggaaaacacttgttcaggaatggactgtgcagcggccagggcagacgtgccagcccatcctggaggagcagtgtcttgtccccgacagctcccactgccaggtcctcctcttaccactgtttgctgaatgccacaaggtcctggctccagccacattctatgccatctgccagcaggacagttgccaccaggagcaagtgtgtgaggtgatcgcctcttatgcccacctctgtcggaccaacggggtctgcgttgactggaggacacctgatttctgtgctatgtcatgcccaccatctctggtctacaaccactgtgagcatggctgtccccggcactgtgatggcaacgtgagctcctgtggggaccatccctccgaaggctgtttctgccctccagataaagtcatgttggaaggcagctgtgtccctgaagaggcctgcactcagtgcattggtgaggatggagtccagcaccagttcctggaagcctgggtcccggaccaccagccctgtcagatctgcacatgcctcagcgggcggaaggtcaactgcacaacgcagccctgccccacggccaaagctcccacgtgtggcctgtgtgaagtagcccgcctccgccagaatgcagaccagtgctgccccgagtatgagtgtgtgtgtgacccagtgagctgtgacctgcccccagtgcctcactgtgaacgtggcctccagcccacactgaccaaccctggcgagtgcagacccaacttcacctgcgcctgcaggaaggaggagtgcaaaagagtgtccccaccctcctgccccccgcaccgtttgcccacccttcggaagacccagtgctgtgatgagtatgagtgtgcctgcaactgtgtcaactccacagtgagctgtccccttgggtacttggcctcaaccgccaccaatgactgtggctgtaccacaaccacctgccttcccgacaaggtgtgtgtccaccgaagcaccatctaccctgtgggccagttctgggaggagggctgcgatgtgtgcacctgcaccgacatggaggatgccgtgatgggcctccgcgtggcccagtgctcccagaagccctgtgaggacagctgtcggtcgggcttcacttacgttctgcatgaaggcgagtgctgtggaaggtgcctgccatctgcctgtgaggtggtgactggctcaccgcggggggactcccagtcttcctggaagagtgtcggctcccagtgggcctccccggagaacccctgcctcatcaatgagtgtgtccgagtgaaggaggaggtctttatacaacaaaggaacgtctcctgcccccagctggaggtccctgtctgcccctcgggctttcagctgagctgtaagacctcagcgtgctgcccaagctgtcgctgtgagcgcatggaggcctgcatgctcaatggcactgtcattgggcccgggaagactgtgatgatcgatgtgtgcacgacctgccgctgcatggtgcaggtgggggtcatctctggattcaagctggagtgcaggaagaccacctgcaacccctgccccctgggttacaaggaagaaaataacacaggtgaatgttgtgggagatgtttgcctacggcttgcaccattcagctaagaggaggacagatcatgacactgaagcgtgatgagacgctccaggatggctgtgatactcacttctgcaaggtcaatgagagaggagagtacttctgggagaagagggtcacaggctgcccaccctttgatgaacacaagtgtcttgctgagggaggtaaaattatgaaaattccaggcacctgctgtgacacatgtgaggagcctgagtgcaacgacatcactgccaggctgcagtatgtcaaggtgggaagctgtaagtctgaagtagaggtggatatccactactgccagggcaaatgtgccagcaaagccatgtactccattgacatcaacgatgtgcaggaccagtgctcctgctgctctccgacacggacggagcccatgcaggtggccctgcactgcaccaatggctctgttgtgtaccatgaggttctcaatgccatggagtgcaaatgctcccccaggaagtgcagcaagtga

SEQ ID NO: 21 - protein, 2813 aa, Homo sapiens
  misc_feature (2016)..(2016): Xaa can be any naturally occurring amino acid
MIPARFAGVLLALALILPGTLCAEGTRGRSSTARCSLFGSDFVNTFDGSMYSFAGYCSYLLAGGCQKRSFSIIGDFQNGKRVSLSVYLGEFFDIHLFVNGTVTQGDQRVSMPYASKGLYLETEAGYYKLSGEAYGFVARIDGSGNFQVLLSDRYFNKTCGLCGNFNIFAEDDFMTQEGTLTSDPYDFANSWALSSGEQWCERASPPSSSCNISSGEMQKGLWEQCQLLKSTSVFARCHPLVDPEPFVALCEKTLCECAGGLECACPALLEYARTCAQEGMVLYGWTDHSACSPVCPAGMEYRQCVSPCARTCQSLHINEMCQERCVDGCSCPEGQLLDEGLCVESTECPCVHSGKRYPPGTSLSRDCNTCICRNSQWICSNEECPGECLVTGQSHFKSFDNRYFTFSGICQYLLARDCQDHSFSIVIETVQCADDRDAVCTRSVTVRLPGLHNSLVKLKHGAGVAMDGQDIQLPLLKGDLRIQHTVTASVRLSYGEDLQMDWDGRGRLLVKLSPVYAGKTCGLCGNYNGNQGDDFLTPSGLAEPRVEDFGNAWKLHGDCQDLQKQHSDPCALNPRMTRFSEEACAVLTSPTFEACHRAVSPLPYLRNCRYDVCSCSDGRECLCGALASYAAACAGRGVRVAWREPGRCELNCPKGQVYLQCGTPCNLTCRSLSYPDEECNEACLEGCFCPPGLYMDERGDCVPKAQCPCYYDGEIFQPEDIFSDHHTMCYCEDGFMHCTMSGVPGSLLPDAVLSSPLSHRSKRSLSCRPPMVKLVCPADNLRAEGLECTKTCQNYDLECMSMGCVSGCLCPPGMVRHENRCVALERCPCFHQGKEYAPGETVKIGCNTCVCRDRKWNCTDHVCDATCSTIGMAHYLTFDGLKYLFPGECQYVLVQDYCGSNPGTFRILVGNKGCSHPSVKCKKRVTILVEGGEIELFDGEVNVKRPMKDETHFEVVESGRYIILLLGKALSVVWDRHLSISVVLKQTYQEKVCGLCGNFDGIQNNDLTSSNLQVEEDPVDFGNSWKVSSQCADTRKVPLDSSPATCHNNIMKQTMVDSSCRILTSDVFQDCNKLVDPEPYLDVCIYDTCSCESIGDCACFCDTIAAYAHVCAQHGKVVTWRTATLCPQSCEERNLRENGYECEWRYNSCAPACQVTCQHPEPLACPVQCVEGCHAHCPPGKILDELLQTCVDPEDCPVCEVAGRRFASGKKVTLNPSDPEHCQICHCDVVNLTCEACQEPGGLVVPPTDAPVSPTTLYVEDISEPPLHDFYCSRLLDLVFLLDGSSRLSEAEFEVLKAFVVDMMERLRISQKWVRVAVVEYHDGSHAYIGLKDRKRPSELRRIASQVKYAGSQVASTSEVLKYTLFQIFSKIDRPEASRIALLLMASQEPQRMSRNFVRYVQGLKKKKVIVIPVGIGPHANLKQIRLIEKQAPENKAFVLSSVDELEQQRDEIVSYLCDLAPEAPPPTLPPDMAQVTVGPGLLGVSTLGPKRNSMVLDVAFVLEGSDKIGEADFNRSKEFMEEVIQRMDVGQDSIHVTVLQYSYMVTVEYPFSEAQSKGDILQRVREIRYQGGNRTNTGLALRYLSDHSFLVSQGDREQAPNLVYMVTGNPASDEIKRLPGDIQVVPIGVGPNANVQELERIGWPNAPILIQDFETLPREAPDLVLQRCCSGEGLQIPTLSPAPDCSQPLDVILLLDGSSSFPASYFDEMKSFAKAFISKANIGPRLTQVSVLQYGSITTIDVPWNVVPEKAHLLSLVDVMQREGGPSQIGDALGFAVRYLTSEMHGARPGASKAVVILVTDVSVDSVDAAADAARSNRVTVFPIGIGDRYDAAQLRILAGPAGDSNVVKLQRIEDLPTMVTLGNSFLHKLCSGFVRICMDEDGNEKRPGDVWTLPDQCHTVTCQPDGQTLLKSHRVNCDRGLRPSCPNSQSPVKVEETCGCRWTCPCVCTGSSTRHIVTFDGQNFKLTGSCSYVLFQNKEQDLEVILHNGACSPGARQGCMKSIEVKHSALSVEXHSDMEVTVNGRLVSVPYVGGNMEVNVYGAIMHEVRFNHLGHIFTFTPQNNEFQLQLSPKTFASKTYGLCGICDENGANDFMLRDGTVTTDWKTLVQEWTVQRPGQTCQPILEEQCLVPDSSHCQVLLLPLFAECHKVLAPATFYAICQQDSCHQEQVCEVIASYAHLCRTNGVCVDWRTPDFCAMSCPPSLVYNHCEHGCPRHCDGNVSSCGDHPSEGCFCPPDKVMLEGSCVPEEACTQCIGEDGVQHQFLEAWVPDHQPCQICTCLSGRKVNCTTQPCPTAKAPTCGLCEVARLRQNADQCCPEYECVCDPVSCDLPPVPHCERGLQPTLTNPGECRPNFTCACRKEECKRVSPPSCPPHRLPTLRKTQCCDEYECACNCVNSTVSCPLGYLASTATNDCGCTTTTCLPDKVCVHRSTIYPVGQFWEEGCDVCTCTDMEDAVMGLRVAQCSQKPCEDSCRSGFTYVLHEGECCGRCLPSACEVVTGSPRGDSQSSWKSVGSQWASPENPCLINECVRVKEEVFIQQRNVSCPQLEVPVCPSGFQLSCKTSACCPSCRCERMEACMLNGTVIGPGKTVMIDVCTTCRCMVQVGVISGFKLECRKTTCNPCPLGYKEENNTGECCGRCLPTACTIQLRGGQIMTLKRDETLQDGCDTHFCKVNERGEYFWEKRVTGCPPFDEHKCLAEGGKIMKIPGTCCDTCEEPECNDITARLQYVKVGSCKSEVEVDIHYCQGKCASKAMYSIDINDVQDQCSCCSPTRTEPMQVALHCTNGSVVYHEVLNAMECKCSPRKCSK

SEQ ID NO: 22 - protein, 45 aa, Artificial Sequence
  pSYN VWF059A
TSTEEGASSDKNTGDYYEDSYEDISAYLLSKNNAIEPRSFSDKTH

SEQ ID NO: 23 - protein, 54 aa, Artificial Sequence
  pSYN VWF073
TSTEEGASSGGGGSGGGGSGGGGSGGGGSGGGGSGGGGSIEPRSFSGSGGDKTH

SEQ ID NO: 24 - protein, 12 aa, Artificial Sequence
  XTEN Motif Family AD
GESPGGSSGSES

SEQ ID NO: 25 - protein, 12 aa, Artificial Sequence
  XTEN Motif Family AD
GSEGSSGPGESS

SEQ ID NO: 26 - protein, 12 aa, Artificial Sequence
  XTEN Motif Family AD
GSSESGSSEGGP

SEQ ID NO: 27 - protein, 12 aa, Artificial Sequence
  XTEN Motif Family AD
GSGGEPSESGSS

SEQ ID NO: 28 - protein, 12 aa, Artificial Sequence
  XTEN Motif Families AE, AM
GSPAGSPTSTEE

SEQ ID NO: 29 - protein, 12 aa, Artificial Sequence
  XTEN Motif Families AE, AM, AQ
GSEPATSGSETP

SEQ ID NO: 30 - protein, 12 aa, Artificial Sequence
  XTEN Motif Families AE, AM, AQ
GTSESATPESGP

SEQ ID NO: 31 - protein, 12 aa, Artificial Sequence
  XTEN Motif Families AE, AM, AQ
GTSTEPSEGSAP

SEQ ID NO: 32 - protein, 12 aa, Artificial Sequence
  XTEN Motif Families AF, AM
GSTSESPSGTAP

SEQ ID NO: 33 - protein, 12 aa, Artificial Sequence
  XTEN Motif Families AF, AM
GTSTPESGSASP

SEQ ID NO: 34 - protein, 12 aa, Artificial Sequence
  AF, AM
GTSPSGESSTAP

SEQ ID NO: 35 - protein, 12 aa, Artificial Sequence
  XTEN Motif Families AF, AM
GSTSSTAESPGP

SEQ ID NO: 36 - protein, 12 aa, Artificial Sequence
  XTEN Motif Families AG, AM
GTPGSGTASSSP

SEQ ID NO: 37 - protein, 12 aa, Artificial Sequence
  XTEN Motif Families AG, AM
GSSTPSGATGSP

SEQ ID NO: 38 - protein, 12 aa, Artificial Sequence
  XTEN Motif Families AG, AM
GSSPSASTGTGP

SEQ ID NO: 39 - protein, 12 aa, Artificial Sequence
  XTEN Motif Families AG, AM
GASPGTSSTGSP

SEQ ID NO: 40 - protein, 12 aa, Artificial Sequence
  XTEN Motif Family AQ
GEPAGSPTSTSE

SEQ ID NO: 41 - protein, 12 aa, Artificial Sequence
  XTEN Motif Family AQ
GTGEPSSTPASE

SEQ ID NO: 42 - protein, 12 aa, Artificial Sequence
  XTEN Motif Family AQ
GSGPSTESAPTE

SEQ ID NO: 43 - protein, 12 aa, Artificial Sequence
  XTEN Motif Family AQ
GSETPSGPSETA

SEQ ID NO: 44 - protein, 12 aa, Artificial Sequence
  XTEN Motif Family AQ
GPSETSTSEPGA

SEQ ID NO: 45 - protein, 12 aa, Artificial Sequence
  XTEN Motif Family AQ
GSPSEPTEGTSA

SEQ ID NO: 46 - protein, 12 aa, Artificial Sequence
  XTEN Motif Family BC
GSGASEPTSTEP

SEQ ID NO: 47 - protein, 12 aa, Artificial Sequence
  XTEN Motif Family BC
GSEPATSGTEPS

SEQ ID NO: 48 - protein, 12 aa, Artificial Sequence
  XTEN Motif Family BC
GTSEPSTSEPGA

SEQ ID NO: 49 - protein, 12 aa, Artificial Sequence
  XTEN Family Motif BC
GTSTEPSEPGSA

SEQ ID NO: 50 - protein, 12 aa, Artificial Sequence
  XTEN Motif Family BD
GSTAGSETSTEA

SEQ ID NO: 51 - protein, 12 aa, Artificial Sequence
  XTEN Motif Family BD
GSETATSGSETA

SEQ ID NO: 52 - protein, 12 aa, Artificial Sequence
  XTEN Motif Family BD
GTSESATSESGA

SEQ ID NO: 53 - protein, 12 aa, Artificial Sequence
  XTEN Motif Family BD
GTSTEASEGSAS

SEQ ID NO: 54 - protein, 288 aa, Artificial Sequence
  XTEN AE288_2
GSPAGSPTSTEEGTSESATPESGPGSEPATSGSETPGTSESATPESGPGTSTEPSEGSAPGTSTEPSEGSAPGTSTEPSEGSAPGTSTEPSEGSAPGTSTEPSEGSAPGTSTEPSEGSAPGSPAGSPTSTEEGTSTEPSEGSAPGTSESATPESGPGSEPATSGSETPGTSESATPESGPGSEPATSGSETPGTSESATPESGPGTSTEPSEGSAPGTSESATPESGPGSPAGSPTSTEEGSPAGSPTSTEEGSPAGSPTSTEEGTSESATPESGPGTSTEPSEGSAP

SEQ ID NO: 55 - protein, 143 aa, Artificial Sequence
  XTEN AE144_2A
STEPSEGSAPGSPAGSPTSTEEGTSTEPSEGSAPGTSTEPSEGSAPGTSESATPESGPGTSTEPSEGSAPGTSESATPESGPGSEPATSGSETPGTSTEPSEGSAPGTSTEPSEGSAPGTSESATPESGPGTSESATPESGPG

SEQ ID NO: 56 - protein, 144 aa, Artificial Sequence
  XTEN AE144_3B
SPAGSPTSTEEGTSESATPESGPGSEPATSGSETPGTSESATPESGPGTSTEPSEGSAPGTSTEPSEGSAPGTSTEPSEGSAPGTSTEPSEGSAPGTSTEPSEGSAPGTSTEPSEGSAPGSPAGSPTSTEEGTSTEPSEGSAPG

SEQ ID NO: 57 - protein, 144 aa, Artificial Sequence
  XTEN AE144_4A
TSESATPESGPGSEPATSGSETPGTSESATPESGPGSEPATSGSETPGTSESATPESGPGTSTEPSEGSAPGTSESATPESGPGSPAGSPTSTEEGSPAGSPTSTEEGSPAGSPTSTEEGTSESATPESGPGTSTEPSEGSAPG

SEQ ID NO: 58 - protein, 144 aa, Artificial Sequence
  XTEN AE144_5A
TSESATPESGPGSEPATSGSETPGTSESATPESGPGSEPATSGSETPGTSESATPESGPGTSTEPSEGSAPGSPAGSPTSTEEGTSESATPESGPGSEPATSGSETPGTSESATPESGPGSPAGSPTSTEEGSPAGSPTSTEEG

SEQ ID NO: 59 - protein, 144 aa, Artificial Sequence
  XTEN AE144_6B
TSTEPSEGSAPGTSESATPESGPGTSESATPESGPGTSESATPESGPGSEPATSGSETPGSEPATSGSETPGSPAGSPTSTEEGTSTEPSEGSAPGTSTEPSEGSAPGSEPATSGSETPGTSESATPESGPGTSTEPSEGSAPG

SEQ ID NO: 60 - protein, 144 aa, Artificial Sequence
  XTEN AG144_A
GASPGTSSTGSPGSSPSASTGTGPGSSPSASTGTGPGTPGSGTASSSPGSSTPSGATGSPGSSPSASTGTGPGASPGTSSTGSPGTPGSGTASSSPGSSTPSGATGSPGTPGSGTASSSPGASPGTSSTGSPGASPGTSSTGSP

SEQ ID NO: 61 - protein, 144 aa, Artificial Sequence
  XTEN AG144_B
GTPGSGTASSSPGSSTPSGATGSPGASPGTSSTGSPGTPGSGTASSSPGSSTPSGATGSPGSSPSASTGTGPGSSPSASTGTGPGSSTPSGATGSPGSSTPSGATGSPGASPGTSSTGSPGASPGTSSTGSPGASPGTSSTGSP

SEQ ID NO: 62 - protein, 144 aa, Artificial Sequence
  XTEN AG144_C
GTPGSGTASSSPGASPGTSSTGSPGASPGTSSTGSPGASPGTSSTGSPGSSPSASTGTGPGTPGSGTASSSPGASPGTSSTGSPGASPGTSSTGSPGASPGTSSTGSPGSSTPSGATGSPGSSTPSGATGSPGASPGTSSTGSP

SEQ ID NO: 63 - protein, 144 aa, Artificial Sequence
  AG144_F
GSSPSASTGTGPGSSPSASTGTGPGASPGTSSTGSPGASPGTSSTGSPGSSTPSGATGSPGSSPSASTGTGPGASPGTSSTGSPGSSPSASTGTGPGTPGSGTASSSPGSSTPSGATGSPGSSTPSGATGSPGASPGTSSTGSP

SEQ ID NO: 64 - protein, 19 aa, Artificial Sequence
  FVIII Signal Peptide
MQIELSTCFFLCLLRFCFS

SEQ ID NO: 65 - protein, 4492 aa, Artificial Sequence
  Mature Factor VIII
ATRRYYLGAVELSWDYMQSDLGELPVDARFPPRVPKSFPFNTSVVYKKTLFVEFTDHLFNIAKPRPPWMGLLGPTIQAEVYDTVVITLKNMASHPVSLHAVGVSYWKASEGAEYDDQTSQREKEDDKVFPGGSHTYVWQVLKENGPMASDPLCLTYSYLSHVDLVKDLNSGLIGALLVCREGSLAKEKTQTLHKFILLFAVFDEGKSWHSETKNSLMQDRDAASARAWPKMHTVNGYVNRSLPGLIGCHRKSVYWHVIGMGTTPEVHSIFLEGHTFLVRNHRQASLEISPITFLTAQTLLMDLGQFLLFCHISSHQHDGMEAYVKVDSCPEEPQLRMKNNEEAEDYDDDLTDSEMDVVRFDDDNSPSFIQIRSVAKKHPKTWVHYIAAEEEDWDYAPLVLAPDDRSYKSQYLNNGPQRIGRKYKKVRFMAYTDETFKTREAIQHESGILGPLLYGEVGDTLLIIFKNQASRPYNIYPHGITDVRPLYSRRLPKGVKHLKDFPILPGEIFKYKWTVTVEDGPTKSDPRCLTRYYSSFVNMERDLASGLIGPLLICYKESVDQRGNQIMSDKRNVILFSVFDENRSWYLTENIQRFLPNPAGVQLEDPEFQASNIMHSINGYVFDSLQLSVCLHEVAYWYILSIGAQTDFLSVFFSGYTFKHKMVYEDTLTLFPFSGETVFMSMENPGLWILGCHNSDFRNRGMTALLKVSSCDKNTGDYYEDSYEDISAYLLSKNNAIEPRSFSQNSRHPSTRQKQFNATTIPENDIEKTDPWFAHRTPMPKIQNVSSSDLLMLLRQSPTPHGLSLSDLQEAKYETFSDDPSPGAIDSNNSLSEMTHFRPQLHHSGDMVFTPESGLQLRLNEKLGTTAATELKKLDFKVSSTSNNLISTIPSDNLAAGTDNTSSLGPPSMPVHYDSQLDTTLFGKKSSPLTESGGPLSLSEENNDSKLLESGLMNSQESSWGKNVSSTESGRLFKGKRAHGPALLTKDNALFKVSISLLKTNKTSNNSATNRKTHIDGPSLLIENSPSVWQNILESDTEFKKVTPLIHDRMLMDKNATALRLNHMSNKTTSSKNMEMVQQKKEGPIPPDAQNPDMSFFKMLFLPESARWIQRTHGKNSLNSGQGPSPKQLVSLGPEKSVEGQNFLSEKNKVVVGKGEFTKDVGLKEMVFPSSRNLFLTNLDNLHENNTHNQEKKIQEEIEKKETLIQENVVLPQIHTVTGTKNFMKNLFLLSTRQNVEGSYDGAYAPVLQDFRSLNDSTNRTKKHTAHFSKKGEEENLEGLGNQTKQIVEKYACTTRISPNTSQQNFVTQRSKRALKQFRLPLEETELEKRIIVDDTSTQWSKNMKHLTPSTLTQIDYNEKEKGAITQSPLSDCLTRSHSIPQANRSPLPIAKVSSFPSIRPIYLTRVLFQDNSSHLPAASYRKKDSGVQESSHFLQGAKKNNLSLAILTLEMTGDQREVGSLGTSATNSVTYKKVENTVLPKPDLPKTSGKVELLPKVHIYQKDLFPTETSNGSPGHLDLVEGSLLQGTEGAIKWNEANRPGKVPFLRVATESSAKTPSKLLDPLAWDNHYGTQIPKEEWKSQEKSPEKTAFKKKDTILSLNACESNHAIAAINEGQNKPEIEVTWAKQGRTERLCSQNPPVLKRHQREITRTTLQSDQEEIDYDDTISVEMKKEDFDIYDEDENQSPRSFQKKTRHYFIAAVERLWDYGMSSSPHVLRNRAQSGSVPQFKKVVFQEFTDGSFTQPLYRGELNEHLGLLGPYIRAEVEDNIMVTFRNQASRPYSFYSSLISYEEDQRQGAEPRKNFVKPNETKTYFWKVQHHMAPTKDEFDCKAWAYFSDVDLEKDVHSGLIGPLLVCHTNTLNPAHGRQVTVQEFALFFTIFDETKSWYFTENMERNCRAPCNIQMEDPTFKENYRFHAINGYIMDTLPGLVMAQDQRIRWYLLSMGSNENIHSIHFSGHVFTVRKKEEYKMALYNLYPGVFETVEMLPSKAGIWRVECLIGEHLHAGMSTLFLVYSNKCQTPLGMASGHIRDFQITASGQYGQWAPKLARLHYSGSINAWSTKEPFSWIKVDLLAPMIIHGIKTQGARQKFSSLYISQFIIMYSLDGKKWQTYRGNSTGTLMVFFGNVDSSGIKHNIFNPPIIARYIRLHPTHYSIRSATRRYYLGAVELSWDYMQSDLGELPVDARFPPRVPKSFPFNTSVVYKKTLFVEFTDHLFNIAKPRPPWMGLLGPTIQAEVYDTVVITLKNMASHPVSLHAVGVSYWKASEGAEYDDQTSQREKEDDKVFPGGSHTYVWQVLKENGPMASDPLCLTYSYLSHVDLVKDLNSGLIGALLVCREGSLAKEKTQTLHKFILLFAVFDEGKSWHSETKNSLMQDRDAASARAWPKMHTVNGYVNRSLPGLIGCHRKSVYWHVIGMGTTPEVHSIFLEGHTFLVRNHRQASLEISPITFLTAQTLLMDLGQFLLFCHISSHQHDGMEAYVKVDSCPEEPQLRMKNNEEAEDYDDDLTDSEMDVVRFDDDNSPSFIQIRSVAKKHPKTWVHYIAAEEEDWDYAPLVLAPDDRSYKSQYLNNGPQRIGRKYKKVRFMAYTDETFKTREAIQHESGILGPLLYGEVGDTLLIIFKNQASRPYNIYPHGITDVRPLYSRRLPKGVKHLKDFPILPGEIFKYKWTVTVEDGPTKSDPRCLTRYYSSFVNMERDLASGLIGPLLICYKESVDQRGNQIMSDKRNVILFSVFDENRSWYLTENIQRFLPNPAGVQLEDPEFQASNIMHSINGYVFDSLQLSVCLHEVAYWYILSIGAQTDFLSVFFSGYTFKHKMVYEDTLTLFPFSGETVFMSMENPGLWILGCHNSDFRNRGMTALLKVSSCDKNTGDYYEDSYEDISAYLLSKNNAIEPRSFSQNSRHPSTRQKQFNATTIPENDIEKTDPWFAHRTPMPKIQNVSSSDLLMLLRQSPTPHGLSLSDLQEAKYETFSDDPSPGAIDSNNSLSEMTHFRPQLHHSGDMVFTPESGLQLRLNEKLGTTAATELKKLDFKVSSTSNNLISTIPSDNLAAGTDNTSSLGPPSMPVHYDSQLDTTLFGKKSSPLTESGGPLSLSEENNDSKLLESGLMNSQESSWGKNVSSTESGRLFKGKRAHGPALLTKDNALFKVSISLLKTNKTSNNSATNRKTHIDGPSLLIENSPSVWQNILESDTEFKKVTPLIHDRMLMDKNATALRLNHMSNKTTSSKNMEMVQQKKEGPIPPDAQNPDMSFFKMLFLPESARWIQRTHGKNSLNSGQGPSPKQLVSLGPEKSVEGQNFLSEKNKVVVGKGEFTKDVGLKEMVFPSSRNLFLTNLDNLHENNTHNQEKKIQEEIEKKETLIQENVVLPQIHTVTGTKNFMKNLFLLSTRQNVEGSYDGAYAPVLQDFRSLNDSTNRTKKHTAHFSKKGEEENLEGLGNQTKQIVEKYACTTRISPNTSQQNFVTQRSKRALKQFRLPLEETELEKRIIVDDTSTQWSKNMKHLTPSTLTQIDYNEKEKGAITQSPLSDCLTRSHSIPQANRSPLPIAKVSSFPSIRPIYLTRVLFQDNSSHLPAASYRKKDSGVQESSHFLQGAKKNNLSLAILTLEMTGDQREVGSLGTSATNSVTYKKVENTVLPKPDLPKTSGKVELLPKVHIYQKDLFPTETSNGSPGHLDLVEGSLLQGTEGAIKWNEANRPGKVPFLRVATESSAKTPSKLLDPLAWDNHYGTQIPKEEWKSQEKSPEKTAFKKKDTILSLNACESNHAIAAINEGQNKPEIEVTWAKQGRTERLCSQNPPVLKRHQREITRTTLQSDQEEIDYDDTISVEMKKEDFDIYDEDENQSPRSFQKKTRHYFIAAVERLWDYGMSSSPHVLRNRAQSGSVPQFKKVVFQEFTDGSFTQPLYRGELNEHLGLLGPYIRAEVEDNIMVTFRNQASRPYSFYSSLISYEEDQRQGAEPRKNFVKPNETKTYFWKVQHHMAPTKDEFDCKAWAYFSDVDLEKDVHSGLIGPLLVCHTNTLNPAHGRQVTVQEFALFFTIFDETKSWYFTENMERNCRAPCNIQMEDPTFKENYRFHAINGYIMDTLPGLVMAQDQRIRWYLLSMGSNENIHSIHFSGHVFTVRKKEEYKMALYNLYPGVFETVEMLPSKAGIWRVECLIGEHLHAGMSTLFLVYSNKCQTPLGMASGHIRDFQITASGQYGQWAPKLARLHYSGSINAWSTKEPFSWIKVDLLAPMIIHGIKTQGARQKFSSLYISQFIIMYSLDGKKWQTYRGNSTGTLMVFFGNVDSSGIKHNIFNPPIIARYIRLHPTHYSIRSTLRMELMGCDLNSCSMPLGMESKAISDAQITASSYFTNMFATWSPSKARLHLQGRSNAWRPQVNNPKEWLQVDFQKTMKVTGVTTQGVKSLLTSMYVKEFLISSSQDGHQWTLFFQNGKVKVFQGNQDSFTPVVNSLDPPLLTRYLRIHPQSWVHQIALRMEVLGCEAQDLY

SEQ ID NO: 66 - DNA, 7053 bp, Artificial Sequence
  Full-Length FVIII
atgcaaatagagctctccacctgcttctttctgtgccttttgcgattctgctttagtgccaccagaagatactacctgggtgcagtggaactgtcatgggactatatgcaaagtgatctcggtgagctgcctgtggacgcaagatttcctcctagagtgccaaaatcttttccattcaacacctcagtcgtgtacaaaaagactctgtttgtagaattcacggatcaccttttcaacatcgctaagccaaggccaccctggatgggtctgctaggtcctaccatccaggctgaggtttatgatacagtggtcattacacttaagaacatggcttcccatcctgtcagtcttcatgctgttggtgtatcctactggaaagcttctgagggagctgaatatgatgatcagaccagtcaaagggagaaagaagatgataaagtcttccctggtggaagccatacatatgtctggcaggtcctgaaagagaatggtccaatggcctctgacccactgtgccttacctactcatatctttctcatgtggacctggtaaaagacttgaattcaggcctcattggagccctactagtatgtagagaagggagtctggccaaggaaaagacacagaccttgcacaaatttatactactttttgctgtatttgatgaagggaaaagttggcactcagaaacaaagaactccttgatgcaggatagggatgctgcatctgctcgggcctggcctaaaatgcacacagtcaatggttatgtaaacaggtctctgccaggtctgattggatgccacaggaaatcagtctattggcatgtgattggaatgggcaccactcctgaagtgcactcaatattcctcgaaggtcacacatttcttgtgaggaaccatcgccaggcgtccttggaaatctcgccaataactttccttactgctcaaacactcttgatggaccttggacagtttctactgttttgtcatatctcttcccaccaacatgatggcatggaagcttatgtcaaagtagacagctgtccagaggaaccccaactacgaatgaaaaataatgaagaagcggaagactatgatgatgatcttactgattctgaaatggatgtggtcaggtttgatgatgacaactctccttcctttatccaaattcgctcagttgccaagaagcatcctaaaacttgggtacattacattgctgctgaagaggaggactgggactatgctcccttagtcctcgcccccgatgacagaagttataaaagtcaatatttgaacaatggccctcagcggattggtaggaagtacaaaaaagtccgatttatggcatacacagatgaaacctttaagactcgtgaagctattcagcatgaatcaggaatcttgggacctttactttatggggaagttggagacacactgttgattatatttaagaatcaagcaagcagaccatataacatctaccctcacggaatcactgatgtccgtcctttgtattcaaggagattaccaaaaggtgtaaaacatttgaaggattttccaattctgccaggagaaatattcaaatataaatggacagtgactgtagaagatgggccaactaaatcagatcctcggtgcctgacccgctattactctagtttcgttaatatggagagagatctagcttcaggactcattggccctctcctcatctgctacaaagaatctgtagatcaaagaggaaaccagataatgtcagacaagaggaatgtcatcctgttttctgtatttgatgagaaccgaagctggtacctcacagagaatatacaacgctttctccccaatccagctggagtgcagcttgaggatccagagttccaagcctccaacatcatgcacagcatcaatggctatgtttttgatagtttgcagttgtcagtttgtttgcatgaggtggcatactggtacattctaagcattggagcacagactgacttcctttctgtcttcttctctggatataccttcaaacacaaaatggtctatgaagacacactcaccctattcccattctcaggagaaactgtcttcatgtcgatggaaaacccaggtctatggattctggggtgccacaactcagactttcggaacagaggcatgaccgccttactgaaggtttctagttgtgacaagaacactggtgattattacgaggacagttatgaagatatttcagcatacttgctgagtaaaaacaatgccattgaaccaagaagcttctcccagaattcaagacaccctagcactaggcaaaagcaatttaatgccaccacaattccagaaaatgacatagagaagactgacccttggtttgcacacagaacacctatgcctaaaatacaaaatgtctcctctagtgatttgttgatgctcttgcgacagagtcctactccacatgggctatccttatctgatctccaagaagccaaatatgagactttttctgatgatccatcacctggagcaatagacagtaataacagcctgtctgaaatgacacacttcaggccacagctccatcacagtggggacatggtatttacccctgagtcaggcctccaattaagattaaatgagaaactggggacaactgcagcaacagagttgaagaaacttgatttcaaagtttctagtacatcaaataatctgatttcaacaattccatcagacaatttggcagcaggtactgataatacaagttccttaggacccccaagtatgccagttcattatgatagtcaattagataccactctatttggcaaaaagtcatctccccttactgagtctggtggacctctgagcttgagtgaagaaaataatgattcaaagttgttagaatcaggtttaatgaatagccaagaaagttcatggggaaaaaatgtatcgtcaacagagagtggtaggttatttaaagggaaaagagctcatggacctgctttgttgactaaagataatgccttattcaaagttagcatctctttgttaaagacaaacaaaacttccaataattcagcaactaatagaaagactcacattgatggcccatcattattaattgagaatagtccatcagtctggcaaaatatattagaaagtgacactgagtttaaaaaagtgacacctttgattcatgacagaatgcttatggacaaaaatgctacagctttgaggctaaatcatatgtcaaataaaactacttcatcaaaaaacatggaaatggtccaacagaaaaaagagggccccattccaccagatgcacaaaatccagatatgtcgttctttaagatgctattcttgccagaatcagcaaggtggatacaaaggactcatggaaagaactctctgaactctgggcaaggccccagtccaaagcaattagtatccttaggaccagaaaaatctgtggaaggtcagaatttcttgtctgagaaaaacaaagtggtagtaggaaagggtgaatttacaaaggacgtaggactcaaagagatggtttttccaagcagcagaaacctatttcttactaacttggataatttacatgaaaataatacacacaatcaagaaaaaaaaattcaggaagaaatagaaaagaaggaaacattaatccaagagaatgtagttttgcctcagatacatacagtgactggcactaagaatttcatgaagaaccttttcttactgagcactaggcaaaatgtagaaggttcatatgacggggcatatgctccagtacttcaagattttaggtcattaaatgattcaacaaatagaacaaagaaacacacagctcatttctcaaaaaaaggggaggaagaaaacttggaaggcttgggaaatcaaaccaagcaaattgtagagaaatatgcatgcaccacaaggatatctcctaatacaagccagcagaattttgtcacgcaacgtagtaagagagctttgaaacaattcagactcccactagaagaaacagaacttgaaaaaaggataattgtggatgacacctcaacccagtggtccaaaaacatgaaacatttgaccccgagcaccctcacacagatagactacaatgagaaggagaaaggggccattactcagtctcccttatcagattgccttacgaggagtcatagcatccctcaagcaaatagatctccattacccattgcaaaggtatcatcatttccatctattagacctatatatctgaccagggtcctattccaagacaactcttctcatcttccagcagcatcttatagaaagaaagattctggggtccaagaaagcagtcatttcttacaaggagccaaaaaaaataacctttctttagccattctaaccttggagatgactggtgatcaaagagaggttggctccctggggacaagtgccacaaattcagtcacatacaagaaagttgagaacactgttctcccgaaaccagacttgcccaaaacatctggcaaagttgaattgcttccaaaagttcacatttatcagaaggacctattccctacggaaactagcaatgggtctcctggccatctggatctcgtggaagggagccttcttcagggaacagagggagcgattaagtggaatgaagcaaacagacctggaaaagttccctttctgagagtagcaacagaaagctctgcaaagactccctccaagctattggatcctcttgcttgggataaccactatggtactcagataccaaaagaagagtggaaatcccaagagaagtcaccagaaaaaacagcttttaagaaaaaggataccattttgtccctgaacgcttgtgaaagcaatcatgcaatagcagcaataaatgagggacaaaataagcccgaaatagaagtcacctgggcaaagcaaggtaggactgaaaggctgtgctctcaaaacccaccagtcttgaaacgccatcaacgggaaataactcgtactactcttcagtcagatcaagaggaaattgactatgatgataccatatcagttgaaatgaagaaggaagattttgacatttatgatgaggatgaaaatcagagcccccgcagctttcaaaagaaaacacgacactattttattgctgcagtggagaggctctgggattatgggatgagtagctccccacatgttctaagaaacagggctcagagtggcagtgtccctcagttcaagaaagttgttttccaggaatttactgatggctcctttactcagcccttataccgtggagaactaaatgaacatttgggactcctggggccatatataagagcagaagttgaagataatatcatggtaactttcagaaatcaggcctctcgtccctattccttctattctagccttatttcttatgaggaagatcagaggcaaggagcagaacctagaaaaaactttgtcaagcctaatgaaaccaaaacttacttttggaaagtgcaacatcatatggcacccactaaagatgagtttgactgcaaagcctgggcttatttctctgatgttgacctggaaaaagatgtgcactcaggcctgattggaccccttctggtctgccacactaacacactgaaccctgctcatgggagacaagtgacagtacaggaatttgctctgtttttcaccatctttgatgagaccaaaagctggtacttcactgaaaatatggaaagaaactgcagggctccctgcaatatccagatggaagatcccacttttaaagagaattatcgcttccatgcaatcaatggctacataatggatacactacctggcttagtaatggctcaggatcaaaggattcgatggtatctgctcagcatgggcagcaatgaaaacatccattctattcatttcagtggacatgtgttcactgtacgaaaaaaagaggagtataaaatggcactgtacaatctctatccaggtgtttttgagacagtggaaatgttaccatccaaagctggaatttggcgggtggaatgccttattggcgagcatctacatgctgggatgagcacactttttctggtgtacagcaataagtgtcagactcccctgggaatggcttctggacacattagagattttcagattacagcttcaggacaatatggacagtgggccccaaagctggccagacttcattattccggatcaatcaatgcctggagcaccaaggagcccttttcttggatcaaggtggatctgttggcaccaatgattattcacggcatcaagacccagggtgcccgtcagaagttctccagcctctacatctctcagtttatcatcatgtatagtcttgatgggaagaagtggcagacttatcgaggaaattccactggaaccttaatggtcttctttggcaatgtggattcatctgggataaaacacaatatttttaaccctccaattattgctcgatacatccgtttgcacccaactcattatagcattcgcagcactcttcgcatggagttgatgggctgtgatttaaatagttgcagcatgccattgggaatggagagtaaagcaatatcagatgcacagattactgcttcatcctactttaccaatatgtttgccacctggtctccttcaaaagctcgacttcacctccaagggaggagtaatgcctggagacctcaggtgaataatccaaaagagtggctgcaagtggacttccagaagacaatgaaagtcacaggagtaactactcagggagtaaaatctctgcttaccagcatgtatgtgaaggagttcctcatctccagcagtcaagatggccatcagtggactctcttttttcagaatggcaaagtaaaggtttttcagggaaatcaagactccttcacacctgtggtgaactctctagacccaccgttactgactcgctaccttcgaattcacccccagagttgggtgcaccagattgccctgaggatggaggttctgggctgcgaggcacaggacctctac

SEQ ID NO: 67 - protein, 1438 aa, Artificial Sequence
  BDD FVIII
ATRRYYLGAVELSWDYMQSDLGELPVDARFPPRVPKSFPFNTSVVYKKTLFVEFTDHLFNIAKPRPPWMGLLGPTIQAEVYDTVVITLKNMASHPVSLHAVGVSYWKASEGAEYDDQTSQREKEDDKVFPGGSHTYVWQVLKENGPMASDPLCLTYSYLSHVDLVKDLNSGLIGALLVCREGSLAKEKTQTLHKFILLFAVFDEGKSWHSETKNSLMQDRDAASARAWPKMHTVNGYVNRSLPGLIGCHRKSVYWHVIGMGTTPEVHSIFLEGHTFLVRNHRQASLEISPITFLTAQTLLMDLGQFLLFCHISSHQHDGMEAYVKVDSCPEEPQLRMKNNEEAEDYDDDLTDSEMDVVRFDDDNSPSFIQIRSVAKKHPKTWVHYIAAEEEDWDYAPLVLAPDDRSYKSQYLNNGPQRIGRKYKKVRFMAYTDETFKTREAIQHESGILGPLLYGEVGDTLLIIFKNQASRPYNIYPHGITDVRPLYSRRLPKGVKHLKDFPILPGEIFKYKWTVTVEDGPTKSDPRCLTRYYSSFVNMERDLASGLIGPLLICYKESVDQRGNQIMSDKRNVILFSVFDENRSWYLTENIQRFLPNPAGVQLEDPEFQASNIMHSINGYVFDSLQLSVCLHEVAYWYILSIGAQTDFLSVFFSGYTFKHKMVYEDTLTLFPFSGETVFMSMENPGLWILGCHNSDFRNRGMTALLKVSSCDKNTGDYYEDSYEDISAYLLSKNNAIEPRSFSQNPPVLKRHQREITRTTLQSDQEEIDYDDTISVEMKKEDFDIYDEDENQSPRSFQKKTRHYFIAAVERLWDYGMSSSPHVLRNRAQSGSVPQFKKVVFQEFTDGSFTQPLYRGELNEHLGLLGPYIRAEVEDNIMVTFRNQASRPYSFYSSLISYEEDQRQGAEPRKNFVKPNETKTYFWKVQHHMAPTKDEFDCKAWAYFSDVDLEKDVHSGLIGPLLVCHTNTLNPAHGRQVTVQEFALFFTIFDETKSWYFTENMERNCRAPCNIQMEDPTFKENYRFHAINGYIMDTLPGLVMAQDQRIRWYLLSMGSNENIHSIHFSGHVFTVRKKEEYKMALYNLYPGVFETVEMLPSKAGIWRVECLIGEHLHAGMSTLFLVYSNKCQTPLGMASGHIRDFQITASGQYGQWAPKLARLHYSGSINAWSTKEPFSWIKVDLLAPMIIHGIKTQGARQKFSSLYISQFIIMYSLDGKKWQTYRGNSTGTLMVFFGNVDSSGIKHNIFNPPIIARYIRLHPTHYSIRSTLRMELMGCDLNSCSMPLGMESKAISDAQITASSYFTNMFATWSPSKARLHLQGRSNAWRPQVNNPKEWLQVDFQKTMKVTGVTTQGVKSLLTSMYVKEFLISSSQDGHQWTLFFQNGKVKVFQGNQDSFTPVVNSLDPPLLTRYLRIHPQSWVHQIALRMEVLGCEAQDLY

SEQ ID NO: 68 - DNA, 4371 bp, Artificial Sequence
  BDD FVIII
atgcaaatagagctctccacctgcttctttctgtgccttttgcgattctgctttagtgccaccagaagatactacctgggtgcagtggaactgtcatgggactatatgcaaagtgatctcggtgagctgcctgtggacgcaagatttcctcctagagtgccaaaatcttttccattcaacacctcagtcgtgtacaaaaagactctgtttgtagaattcacggatcaccttttcaacatcgctaagccaaggccaccctggatgggtctgctaggtcctaccatccaggctgaggtttatgatacagtggtcattacacttaagaacatggcttcccatcctgtcagtcttcatgctgttggtgtatcctactggaaagcttctgagggagctgaatatgatgatcagaccagtcaaagggagaaagaagatgataaagtcttccctggtggaagccatacatatgtctggcaggtcctgaaagagaatggtccaatggcctctgacccactgtgccttacctactcatatctttctcatgtggacctggtaaaagacttgaattcaggcctcattggagccctactagtatgtagagaagggagtctggccaaggaaaagacacagaccttgcacaaatttatactactttttgctgtatttgatgaagggaaaagttggcactcagaaacaaagaactccttgatgcaggatagggatgctgcatctgctcgggcctggcctaaaatgcacacagtcaatggttatgtaaacaggtctctgccaggtctgattggatgccacaggaaatcagtctattggcatgtgattggaatgggcaccactcctgaagtgcactcaatattcctcgaaggtcacacatttcttgtgaggaaccatcgccaggcgtccttggaaatctcgccaataactttccttactgctcaaacactcttgatggaccttggacagtttctactgttttgtcatatctcttcccaccaacatgatggcatggaagcttatgtcaaagtagacagctgtccagaggaaccccaactacgaatgaaaaataatgaagaagcggaagactatgatgatgatcttactgattctgaaatggatgtggtcaggtttgatgatgacaactctccttcctttatccaaattcgctcagttgccaagaagcatcctaaaacttgggtacattacattgctgctgaagaggaggactgggactatgctcccttagtcctcgcccccgatgacagaagttataaaagtcaatatttgaacaatggccctcagcggattggtaggaagtacaaaaaagtccgatttatggcatacacagatgaaacctttaagactcgtgaagctattcagcatgaatcaggaatcttgggacctttactttatggggaagttggagacacactgttgattatatttaagaatcaagcaagcagaccatataacatctaccctcacggaatcactgatgtccgtcctttgtattcaaggagattaccaaaaggtgtaaaacatttgaaggattttccaattctgccaggagaaatattcaaatataaatggacagtgactgtagaagatgggccaactaaatcagatcctcggtgcctgacccgctattactctagtttcgttaatatggagagagatctagcttcaggactcattggccctctcctcatctgctacaaagaatctgtagatcaaagaggaaaccagataatgtcagacaagaggaatgtcatcctgttttctgtatttgatgagaaccgaagctggtacctcacagagaatatacaacgctttctccccaatccagctggagtgcagcttgaggatccagagttccaagcctccaacatcatgcacagcatcaatggctatgtttttgatagtttgcagttgtcagtttgtttgcatgaggtggcatactggtacattctaagcattggagcacagactgacttcctttctgtcttcttctctggatataccttcaaacacaaaatggtctatgaagacacactcaccctattcccattctcaggagaaactgtcttcatgtcgatggaaaacccaggtctatggattctggggtgccacaactcagactttcggaacagaggcatgaccgccttactgaaggtttctagttgtgacaagaacactggtgattattacgaggacagttatgaagatatttcagcatacttgctgagtaaaaacaatgccattgaaccaagaagcttctctcaaaacccaccagtcttgaaacgccatcaacgggaaataactcgtactactcttcagtcagatcaagaggaaattgactatgatgataccatatcagttgaaatgaagaaggaagattttgacatttatgatgaggatgaaaatcagagcccccgcagctttcaaaagaaaacacgacactattttattgctgcagtggagaggctctgggattatgggatgagtagctccccacatgttctaagaaacagggctcagagtggcagtgtccctcagttcaagaaagttgttttccaggaatttactgatggctcctttactcagcccttataccgtggagaactaaatgaacatttgggactcctggggccatatataagagcagaagttgaagataatatcatggtaactttcagaaatcaggcctctcgtccctattccttctattctagccttatttcttatgaggaagatcagaggcaaggagcagaacctagaaaaaactttgtcaagcctaatgaaaccaaaacttacttttggaaagtgcaacatcatatggcacccactaaagatgagtttgactgcaaagcctgggcttatttctctgatgttgacctggaaaaagatgtgcactcaggcctgattggaccccttctggtctgccacactaacacactgaaccctgctcatgggagacaagtgacagtacaggaatttgctctgtttttcaccatctttgatgagaccaaaagctggtacttcactgaaaatatggaaagaaactgcagggctccctgcaatatccagatggaagatcccacttttaaagagaattatcgcttccatgcaatcaatggctacataatggatacactacctggcttagtaatggctcaggatcaaaggattcgatggtatctgctcagcatgggcagcaatgaaaacatccattctattcatttcagtggacatgtgttcactgtacgaaaaaaagaggagtataaaatggcactgtacaatctctatccaggtgtttttgagacagtggaaatgttaccatccaaagctggaatttggcgggtggaatgccttattggcgagcatctacatgctgggatgagcacactttttctggtgtacagcaataagtgtcagactcccctgggaatggcttctggacacattagagattttcagattacagcttcaggacaatatggacagtgggccccaaagctggccagacttcattattccggatcaatcaatgcctggagcaccaaggagcccttttcttggatcaaggtggatctgttggcaccaatgattattcacggcatcaagacccagggtgcccgtcagaagttctccagcctctacatctctcagtttatcatcatgtatagtcttgatgggaagaagtggcagacttatcgaggaaattccactggaaccttaatggtcttctttggcaatgtggattcatctgggataaaacacaatatttttaaccctccaattattgctcgatacatccgtttgcacccaactcattatagcattcgcagcactcttcgcatggagttgatgggctgtgatttaaatagttgcagcatgccattgggaatggagagtaaagcaatatcagatgcacagattactgcttcatcctactttaccaatatgtttgccacctggtctccttcaaaagctcgacttcacctccaagggaggagtaatgcctggagacctcaggtgaataatccaaaagagtggctgcaagtggacttccagaagacaatgaaagtcacaggagtaactactcagggagtaaaatctctgcttaccagcatgtatgtgaaggagttcctcatctccagcagtcaagatggccatcagtggactctcttttttcagaatggcaaagtaaaggtttttcagggaaatcaagactccttcacacctgtggtgaactctctagacccaccgttactgactcgctaccttcgaattcacccccagagttgggtgcaccagattgccctgaggatggaggttctgggctgcgaggcacaggacctctac

SEQ ID NO: 69 - protein, 2754 aa, Artificial Sequence
  pSYN-FVIII-161
MQIELSTCFFLCLLRFCFSATRRYYLGAVELSWDYMQSDLGELPVDARFPPRVPKSFPFNTSVVYKKTLFVEFTDHLFNIAKPRPPWMGLLGPTIQAEVYDTVVITLKNMASHPVSLHAVGVSYWKASEGAEYDDQTSQREKEDDKVFPGGSHTYVWQVLKENGPMASDPLCLTYSYLSHVDLVKDLNSGLIGALLVCREGSLAKEKTQTLHKFILLFAVFDEGKSWHSETKNSLMQDRDAASARAWPKMHTVNGYVNRSLPGLIGCHRKSVYWHVIGMGTTPEVHSIFLEGHTFLVRNHRQASLEISPITFLTAQTLLMDLGQFLLFCHISSHQHDGMEAYVKVDSCPEEPQLRMKNNEEAEDYDDDLTDSEMDVVRFDDDNSPSFIQIRSVAKKHPKTWVHYIAAEEEDWDYAPLVLAPDDRSYKSQYLNNGPQRIGRKYKKVRFMAYTDETFKTREAIQHESGILGPLLYGEVGDTLLIIFKNQASRPYNIYPHGITDVRPLYSRRLPKGVKHLKDFPILPGEIFKYKWTVTVEDGPTKSDPRCLTRYYSSFVNMERDLASGLIGPLLICYKESVDQRGNQIMSDKRNVILFSVFDENRSWYLTENIQRFLPNPAGVQLEDPEFQASNIMHSINGYVFDSLQLSVCLHEVAYWYILSIGAQTDFLSVFFSGYTFKHKMVYEDTLTLFPFSGETVFMSMENPGLWILGCHNSDFRNRGMTALLKVSSCDKNTGDYYEDSYEDISAYLLSKNNAIEPRSFSQNPPVLKRHQREITRTTLQSDQEEIDYDDTISVEMKKEDFDIYDEDENQSPRSFQKKTRHYFIAAVERLWDYGMSSSPHVLRNRAQSGSVPQFKKVVFQEFTDGSFTQPLYRGELNEHLGLLGPYIRAEVEDNIMVTFRNQASRPYSFYSSLISYEEDQRQGAEPRKNFVKPNETKTYFWKVQHHMAPTKDEFDCKAWAYFSDVDLEKDVHSGLIGPLLVCHTNTLNPAHGRQVTVQEFALFFTIFDETKSWYFTENMERNCRAPCNIQMEDPTFKENYRFHAINGYIMDTLPGLVMAQDQRIRWYLLSMGSNENIHSIHFSGHVFTVRKKEEYKMALYNLYPGVFETVEMLPSKAGIWRVECLIGEHLHAGMSTLFLVYSNKCQTPLGMASGHIRDFQITASGQYGQWAPKLARLHYSGSINAWSTKEPFSWIKVDLLAPMIIHGIKTQGARQKFSSLYISQFIIMYSLDGKKWQTYRGNSTGTLMVFFGNVDSSGIKHNIFNPPIIARYIRLHPTHYSIRSTLRMELMGCDLNSCSMPLGMESKAISDAQITASSYFTNMFATWSPSKARLHLQGRSNAWRPQVNNPKEWLQVDFQKTMKVTGVTTQGVKSLLTSMYVKEFLISSSQDGHQWTLFFQNGKVKVFQGNQDSFTPVVNSLDPPLLTRYLRIHPQSWVHQIALRMEVLGCEAQDLYDKTHTCPPCPAPELLGGPSVFLFPPKPKDTLMISRTPEVTCVVVDVSHEDPEVKFNWYVDGVEVHNAKTKPREEQYNSTYRVVSVLTVLHQDWLNGKEYKCKVSNKALPAPIEKTISKAKGQPREPQVYTLPPSRDELTKNQVSLTCLVKGFYPSDIAVEWESNGQPENNYKTTPPVLDSDGSFFLYSKLTVDKSRWQQGNVFSCSVMHEALHNHYTQKSLSLSPGKRRRRSGGGGSGGGGSGGGGSGGGGSGGGGSGGGGSRKRRKRSLSCRPPMVKLVCPADNLRAEGLECTKTCQNYDLECMSMGCVSGCLCPPGMVRHENRCVALERCPCFHQGKEYAPGETVKIGCNTCVCRDRKWNCTDHVCDATCSTIGMAHYLTFDGLKYLFPGECQYVLVQDYCGSNPGTFRILVGNKGCSHPSVKCKKRVTILVEGGEIELFDGEVNVKRPMKDETHFEVVESGRYIILLLGKALSVVWDRHLSISVVLKQTYQEKVCGLCGNFDGIQNNDLTSSNLQVEEDPVDFGNSWKVSSQCADTRKVPLDSSPATCHNNIMKQTMVDSSCRILTSDVFQDCNKLVDPEPYLDVCIYDTCSCESIGDCAAFCDTIAAYAHVCAQHGKVVTWRTATLCPQSCEERNLRENGYEAEWRYNSCAPACQVTCQHPEPLACPVQCVEGCHAHCPPGKILDELLQTCVDPEDCPVCEVAGRRFASGKKVTLNPSDPEHCQICHCDVVNLTCEACQEPISGTSESATPESGPGSEPATSGSETPGTSESATPESGPGSEPATSGSETPGTSESATPESGPGTSTEPSEGSAPGSPAGSPTSTEEGTSESATPESGPGSEPATSGSETPGTSESATPESGPGSPAGSPTSTEEGSPAGSPTSTEEGTSTEPSEGSAPGTSESATPESGPGTSESATPESGPGTSESATPESGPGSEPATSGSETPGSEPATSGSETPGSPAGSPTSTEEGTSTEPSEGSAPGTSTEPSEGSAPGSEPATSGSETPGTSESATPESGPGTSTEPSEGSAPDSGGGGSGGGGSGGGGSGGGGSGGGGSLVPRGSGGDKTHTCPPCPAPELLGGPSVFLFPPKPKDTLMISRTPEVTCVVVDVSHEDPEVKFNWYVDGVEVHNAKTKPREEQYNSTYRVVSVLTVLHQDWLNGKEYKCKVSNKALPAPIEKTISKAKGQPREPQVYTLPPSRDELTKNQVSLTCLVKGFYPSDIAVEWESNGQPENNYKTTPPVLDSDGSFFLYSKLTVDKSRWQQGNVFSCSVMHEALHNHYTQKSLSLSPGK

SEQ ID NO: 70 - protein, 1978 aa, Artificial Sequence
  FVIII 169
MQIELSTCFFLCLLRFCFSATRRYYLGAVELSWDYMQSDLGELPVDARFPPRVPKSFPFNTSVVYKKTLFVEFTDHLFNIAKPRPPWMGLLGPTIQAEVYDTVVITLKNMASHPVSLHAVGVSYWKASEGAEYDDQTSQREKEDDKVFPGGSHTYVWQVLKENGPMASDPLCLTYSYLSHVDLVKDLNSGLIGALLVCREGSLAKEKTQTLHKFILLFAVFDEGKSWHSETKNSLMQDRDAASARAWPKMHTVNGYVNRSLPGLIGCHRKSVYWHVIGMGTTPEVHSIFLEGHTFLVRNHRQASLEISPITFLTAQTLLMDLGQFLLFCHISSHQHDGMEAYVKVDSCPEEPQLRMKNNEEAEDYDDDLTDSEMDVVRFDDDNSPSFIQIRSVAKKHPKTWVHYIAAEEEDWDYAPLVLAPDDRSYKSQYLNNGPQRIGRKYKKVRFMAYTDETFKTREAIQHESGILGPLLYGEVGDTLLIIFKNQASRPYNIYPHGITDVRPLYSRRLPKGVKHLKDFPILPGEIFKYKWTVTVEDGPTKSDPRCLTRYYSSFVNMERDLASGLIGPLLICYKESVDQRGNQIMSDKRNVILFSVFDENRSWYLTENIQRFLPNPAGVQLEDPEFQASNIMHSINGYVFDSLQLSVCLHEVAYWYILSIGAQTDFLSVFFSGYTFKHKMVYEDTLTLFPFSGETVFMSMENPGLWILGCHNSDFRNRGMTALLKVSSCDKNTGDYYEDSYEDISAYLLSKNNAIEPRSFSQNGAPGTSESATPESGPGSEPATSGSETPGTSESATPESGPGSEPATSGSETPGTSESATPESGPGTSTEPSEGSAPGSPAGSPTSTEEGTSESATPESGPGSEPATSGSETPGTSESATPESGPGSPAGSPTSTEEGSPAGSPTSTEEGTSTEPSEGSAPGTSESATPESGPGTSESATPESGPGTSESATPESGPGSEPATSGSETPGSEPATSGSETPGSPAGSPTSTEEGTSTEPSEGSAPGTSTEPSEGSAPGSEPATSGSETPGTSESATPESGPGTSTEPSEGSAPASSPPVLKRHQAEITRTTLQSDQEEIDYDDTISVEMKKEDFDIYDEDENQSPRSFQKKTRHYFIAAVERLWDYGMSSSPHVLRNRAQSGSVPQFKKVVFQEFTDGSFTQPLYRGELNEHLGLLGPYIRAEVEDNIMVTFRNQASRPYSFYSSLISYEEDQRQGAEPRKNFVKPNETKTYFWKVQHHMAPTKDEFDCKAWAYFSDVDLEKDVHSGLIGPLLVCHTNTLNPAHGRQVTVQEFALFFTIFDETKSWYFTENMERNCRAPCNIQMEDPTFKENYRFHAINGYIMDTLPGLVMAQDQRIRWYLLSMGSNENIHSIHFSGHVFTVRKKEEYKMALYNLYPGVFETVEMLPSKAGIWRVECLIGEHLHAGMSTLFLVYSNKCQTPLGMASGHIRDFQITASGQYGQWAPKLARLHYSGSINAWSTKEPFSWIKVDLLAPMIIHGIKTQGARQKFSSLYISQFIIMYSLDGKKWQTYRGNSTGTLMVFFGNVDSSGIKHNIFNPPIIARYIRLHPTHYSIRSTLRMELMGCDLNSCSMPLGMESKAISDAQITASSYFTNMFATWSPSKARLHLQGRSNAWRPQVNNPKEWLQVDFQKTMKVTGVTTQGVKSLLTSMYVKEFLISSSQDGHQWTLFFQNGKVKVFQGNQDSFTPVVNSLDPPLLTRYLRIHPQSWVHQIALRMEVLGCEAQDLYDKTHTCPPCPAPELLGGPSVFLFPPKPKDTLMISRTPEVTCVVVDVSHEDPEVKFNWYVDGVEVHNAKTKPREEQYNSTYRVVSVLTVLHQDWLNGKEYKCKVSNKALPAPIEKTISKAKGQPREPQVYTLPPSRDELTKNQVSLTCLVKGFYPSDIAVEWESNGQPENNYKTTPPVLDSDGSFFLYSKLTVDKSRWQQGNVFSCSVMHEALHNHYTQKSLSLSPGK

SEQ ID NO: 71 - protein, 2242 aa, Artificial Sequence
  pSYN-FVIII-170
SLSCRPPMVKLVCPADNLRAEGLECTKTCQNYDLECMSMGCVSGCLCPPGMVRHENRCVALERCPCFHQGKEYAPGETVKIGCNTCVCRDRKWNCTDHVCDATCSTIGMAHYLTFDGLKYLFPGECQYVLVQDYCGSNPGTFRILVGNKGCSHPSVKCKKRVTILVEGGEIELFDGEVNVKRPMKDETHFEVVESGRYIILLLGKALSVVWDRHLSISVVLKQTYQEKVCGLCGNFDGIQNNDLTSSNLQVEEDPVDFGNSWKVSSQCADTRKVPLDSSPATCHNNIMKQTMVDSSCRILTSDVFQDCNKLVDPEPYLDVCIYDTCSCESIGDCAAFCDTIAAYAHVCAQHGKVVTWRTATLCPQSCEERNLRENGYEAEWRYNSCAPACQVTCQHPEPLACPVQCVEGCHAHCPPGKILDELLQTCVDPEDCPVCEVAGRRFASGKKVTLNPSDPEHCQICHCDVVNLTCEACQEPISGTSESATPESGPGSEPATSGSETPGTSESATPESGPGSEPATSGSETPGTSESATPESGPGTSTEPSEGSAPGSPAGSPTSTEEGTSESATPESGPGSEPATSGSETPGTSESATPESGPGSPAGSPTSTEEGSPAGSPTSTEEGTSTEPSEGSAPGTSESATPESGPGTSESATPESGPGTSESATPESGPGSEPATSGSETPGSEPATSGSETPGSPAGSPTSTEEGTSTEPSEGSAPGTSTEPSEGSAPGSEPATSGSETPGTSESATPESGPGTSTEPSEGSAPDSGGGGSGGGGSGGGGSGGGGSGGGGSLVPRGSGGASATRRYYLGAVELSWDYMQSDLGELPVDARFPPRVPKSFPFNTSVVYKKTLFVEFTDHLFNIAKPRPPWMGLLGPTIQAEVYDTVVITLKNMASHPVSLHAVGVSYWKASEGAEYDDQTSQREKEDDKVFPGGSHTYVWQVLKENGPMASDPLCLTYSYLSHVDLVKDLNSGLIGALLVCREGSLAKEKTQTLHKFILLFAVFDEGKSWHSETKNSLMQDRDAASARAWPKMHTVNGYVNRSLPGLIGCHRKSVYWHVIGMGTTPEVHSIFLEGHTFLVRNHRQASLEISPITFLTAQTLLMDLGQFLLFCHISSHQHDGMEAYVKVDSCPEEPQLRMKNNEEAEDYDDDLTDSEMDVVRFDDDNSPSFIQIRSVAKKHPKTWVHYIAAEEEDWDYAPLVLAPDDRSYKSQYLNNGPQRIGRKYKKVRFMAYTDETFKTREAIQHESGILGPLLYGEVGDTLLIIFKNQASRPYNIYPHGITDVRPLYSRRLPKGVKHLKDFPILPGEIFKYKWTVTVEDGPTKSDPRCLTRYYSSFVNMERDLASGLIGPLLICYKESVDQRGNQIMSDKRNVILFSVFDENRSWYLTENIQRFLPNPAGVQLEDPEFQASNIMHSINGYVFDSLQLSVCLHEVAYWYILSIGAQTDFLSVFFSGYTFKHKMVYEDTLTLFPFSGETVFMSMENPGLWILGCHNSDFRNRGMTALLKVSSCDKNTGDYYEDSYEDISAYLLSKNNAIEPRSFSQNPPVLKRHQREITRTTLQSDQEEIDYDDTISVEMKKEDFDIYDEDENQSPRSFQKKTRHYFIAAVERLWDYGMSSSPHVLRNRAQSGSVPQFKKVVFQEFTDGSFTQPLYRGELNEHLGLLGPYIRAEVEDNIMVTFRNQASRPYSFYSSLISYEEDQRQGAEPRKNFVKPNETKTYFWKVQHHMAPTKDEFDCKAWAYFSDVDLEKDVHSGLIGPLLVCHTNTLNPAHGRQVTVQEFALFFTIFDETKSWYFTENMERNCRAPCNIQMEDPTFKENYRFHAINGYIMDTLPGLVMAQDQRIRWYLLSMGSNENIHSIHFSGHVFTVRKKEEYKMALYNLYPGVFETVEMLPSKAGIWRVECLIGEHLHAGMSTLFLVYSNKCQTPLGMASGHIRDFQITASGQYGQWAPKLARLHYSGSINAWSTKEPFSWIKVDLLAPMIIHGIKTQGARQKFSSLYISQFIIMYSLDGKKWQTYRGNSTGTLMVFFGNVDSSGIKHNIFNPPIIARYIRLHPTHYSIRSTLRMELMGCDLNSCSMPLGMESKAISDAQITASSYFTNMFATWSPSKARLHLQGRSNAWRPQVNNPKEWLQVDFQKTMKVTGVTTQGVKSLLTSMYVKEFLISSSQDGHQWTLFFQNGKVKVFQGNQDSFTPVVNSLDPPLLTRYLRIHPQSWVHQIALRMEVLGCEAQDLY

SEQ ID NO: 72 - protein, 1959 aa, Artificial Sequence
  pSYN-FVIII-173
ATRRYYLGAVELSWDYMQSDLGELPVDARFPPRVPKSFPFNTSVVYKKTLFVEFTDHLFNIAKPRPPWMGLLGPTIQAEVYDTVVITLKNMASHPVSLHAVGVSYWKASEGAEYDDQTSQREKEDDKVFPGGSHTYVWQVLKENGPMASDPLCLTYSYLSHVDLVKDLNSGLIGALLVCREGSLAKEKTQTLHKFILLFAVFDEGKSWHSETKNSLMQDRDAASARAWPKMHTVNGYVNRSLPGLIGCHRKSVYWHVIGMGTTPEVHSIFLEGHTFLVRNHRQASLEISPITFLTAQTLLMDLGQFLLFCHISSHQHDGMEAYVKVDSCPEEPQLRMKNNEEAEDYDDDLTDSEMDVVRFDDDNSPSFIQIRSVAKKHPKTWVHYIAAEEEDWDYAPLVLAPDDRSYKSQYLNNGPQRIGRKYKKVRFMAYTDETFKTREAIQHESGILGPLLYGEVGDTLLIIFKNQASRPYNIYPHGITDVRPLYSRRLPKGVKHLKDFPILPGEIFKYKWTVTVEDGPTKSDPRCLTRYYSSFVNMERDLASGLIGPLLICYKESVDQRGNQIMSDKRNVILFSVFDENRSWYLTENIQRFLPNPAGVQLEDPEFQASNIMHSINGYVFDSLQLSVCLHEVAYWYILSIGAQTDFLSVFFSGYTFKHKMVYEDTLTLFPFSGETVFMSMENPGLWILGCHNSDFRNRGMTALLKVSSCDKNTGDYYEDSYEDISAYLLSKNNAIEPRSFSQNGAPGTSESATPESGPGSEPATSGSETPGTSESATPESGPGSEPATSGSETPGTSESATPESGPGTSTEPSEGSAPGSPAGSPTSTEEGTSESATPESGPGSEPATSGSETPGTSESATPESGPGSPAGSPTSTEEGSPAGSPTSTEEGTSTEPSEGSAPGTSESATPESGPGTSESATPESGPGTSESATPESGPGSEPATSGSETPGSEPATSGSETPGSPAGSPTSTEEGTSTEPSEGSAPGTSTEPSEGSAPGSEPATSGSETPGTSESATPESGPGTSTEPSEGSAPASSPPVLKRHQREITRTTLQSDQEEIDYDDTISVEMKKEDFDIYDEDENQSPRSFQKKTRHYFIAAVERLWDYGMSSSPHVLRNRAQSGSVPQFKKVVFQEFTDGSFTQPLYRGELNEHLGLLGPYIRAEVEDNIMVTFRNQASRPYSFYSSLISYEEDQRQGAEPRKNFVKPNETKTYFWKVQHHMAPTKDEFDCKAWAYFSDVDLEKDVHSGLIGPLLVCHTNTLNPAHGRQVTVQEFALFFTIFDETKSWYFTENMERNCRAPCNIQMEDPTFKENYRFHAINGYIMDTLPGLVMAQDQRIRWYLLSMGSNENIHSIHFSGHVFTVRKKEEYKMALYNLYPGVFETVEMLPSKAGIWRVECLIGEHLHAGMSTLFLVYSNKCQTPLGMASGHIRDFQITASGQYGQWAPKLARLHYSGSINAWSTKEPFSWIKVDLLAPMIIHGIKTQGARQKFSSLYISQFIIMYSLDGKKWQTYRGNSTGTLMVFFGNVDSSGIKHNIFNPPIIARYIRLHPTHYSIRSTLRMELMGCDLNSCSMPLGMESKAISDAQITASSYFTNMFATWSPSKARLHLQGRSNAWRPQVNNPKEWLQVDFQKTMKVTGVTTQGVKSLLTSMYVKEFLISSSQDGHQWTLFFQNGKVKVFQGNQDSFTPVVNSLDPPLLTRYLRIHPQSWVHQIALRMEVLGCEAQDLYDKTHTCPPCPAPELLGGPSVFLFPPKPKDTLMISRTPEVTCVVVDVSHEDPEVKFNWYVDGVEVHNAKTKPREEQYNSTYRVVSVLTVLHQDWLNGKEYKCKVSNKALPAPIEKTISKAKGQPREPQVYTLPPSRDELTKNQVSLTCLVKGFYPSDIAVEWESNGQPENNYKTTPPVLDSDGSFFLYSKLTVDKSRWQQGNVFSCSVMHEALHNHYTQKSLSLSPGK

SEQ ID NO: 73 - protein, 1984 aa, Artificial Sequence
  FVIII 195 (dual chain FVIIIFc with two 144 AE XTENs at amino acid 1656 and 1900)
MQIELSTCFFLCLLRFCFSATRRYYLGAVELSWDYMQSDLGELPVDARFPPRVPKSFPFNTSVVYKKTLFVEFTDHLFNIAKPRPPWMGLLGPTIQAEVYDTVVITLKNMASHPVSLHAVGVSYWKASEGAEYDDQTSQREKEDDKVFPGGSHTYVWQVLKENGPMASDPLCLTYSYLSHVDLVKDLNSGLIGALLVCREGSLAKEKTQTLHKFILLFAVFDEGKSWHSETKNSLMQDRDAASARAWPKMHTVNGYVNRSLPGLIGCHRKSVYWHVIGMGTTPEVHSIFLEGHTFLVRNHRQASLEISPITFLTAQTLLMDLGQFLLFCHISSHQHDGMEAYVKVDSCPEEPQLRMKNNEEAEDYDDDLTDSEMDVVRFDDDNSPSFIQIRSVAKKHPKTWVHYIAAEEEDWDYAPLVLAPDDRSYKSQYLNNGPQRIGRKYKKVRFMAYTDETFKTREAIQHESGILGPLLYGEVGDTLLIIFKNQASRPYNIYPHGITDVRPLYSRRLPKGVKHLKDFPILPGEIFKYKWTVTVEDGPTKSDPRCLTRYYSSFVNMERDLASGLIGPLLICYKESVDQRGNQIMSDKRNVILFSVFDENRSWYLTENIQRFLPNPAGVQLEDPEFQASNIMHSINGYVFDSLQLSVCLHEVAYWYILSIGAQTDFLSVFFSGYTFKHKMVYEDTLTLFPFSGETVFMSMENPGLWILGCHNSDFRNRGMTALLKVSSCDKNTGDYYEDSYEDISAYLLSKNNAIEPRSFSQNPPVLKRHQREITRTTLQGAPGTPGSGTASSSPGASPGTSSTGSPGASPGTSSTGSPGASPGTSSTGSPGSSPSASTGTGPGTPGSGTASSSPGASPGTSSTGSPGASPGTSSTGSPGASPGTSSTGSPGSSTPSGATGSPGSSTPSGATGSPGASPGTSSTGSPASSSDQEEIDYDDTISVEMKKEDFDIYDEDENQSPRSFQKKTRHYFIAAVERLWDYGMSSSPHVLRNRAQSGSVPQFKKVVFQEFTDGSFTQPLYRGELNEHLGLLGPYIRAEVEDNIMVTFRNQASRPYSFYSSLISYEEDQRQGAEPRKNFVKPNETKTYFWKVQHHMAPTKDEFDCKAWAYFSDVDLEKDVHSGLIGPLLVCHTNTLNPAHGRQVTVQEFALFFTIFDETKSWYFTENMERNCRGAPTSESATPESGPGSEPATSGSETPGTSESATPESGPGSEPATSGSETPGTSESATPESGPGTSTEPSEGSAPGTSESATPESGPGSPAGSPTSTEEGSPAGSPTSTEEGSPAGSPTSTEEGTSESATPESGPGTSTEPSEGSAPGASSAPCNIQMEDPTFKENYRFHAINGYIMDTLPGLVMAQDQRIRWYLLSMGSNENIHSIHFSGHVFTVRKKEEYKMALYNLYPGVFETVEMLPSKAGIWRVECLIGEHLHAGMSTLFLVYSNKCQTPLGMASGHIRDFQITASGQYGQWAPKLARLHYSGSINAWSTKEPFSWIKVDLLAPMIIHGIKTQGARQKFSSLYISQFIIMYSLDGKKWQTYRGNSTGTLMVFFGNVDSSGIKHNIFNPPIIARYIRLHPTHYSIRSTLRMELMGCDLNSCSMPLGMESKAISDAQITASSYFTNMFATWSPSKARLHLQGRSNAWRPQVNNPKEWLQVDFQKTMKVTGVTTQGVKSLLTSMYVKEFLISSSQDGHQWTLFFQNGKVKVFQGNQDSFTPVVNSLDPPLLTRYLRIHPQSWVHQIALRMEVLGCEAQDLYDKTHTCPPCPAPELLGGPSVFLFPPKPKDTLMISRTPEVTCVVVDVSHEDPEVKFNWYVDGVEVHNAKTKPREEQYNSTYRVVSVLTVLHQDWLNGKEYKCKVSNKALPAPIEKTISKAKGQPREPQVYTLPPSRDELTKNQVSLTCLVKGFYPSDIAVEWESNGQPENNYKTTPPVLDSDGSFFLYSKLTVDKSRWQQGNVFSCSVMHEALHNHYTQKSLSLSPGK

SEQ ID NO: 74 - protein, 2134 aa, Artificial Sequence
  FVIII 196 (dual chain FVIIIFc with three 144 AE XTENs at amino acid 26, 1656 and 1900)
MQIELSTCFFLCLLRFCFSATRRYYLGAVELSWDYMQSDLGELPVGAPGSSPSASTGTGPGSSPSASTGTGPGASPGTSSTGSPGASPGTSSTGSPGSSTPSGATGSPGSSPSASTGTGPGASPGTSSTGSPGSSPSASTGTGPGTPGSGTASSSPGSSTPSGATGSPGSSTPSGATGSPGASPGTSSTGSPASSDARFPPRVPKSFPFNTSVVYKKTLFVEFTDHLFNIAKPRPPWMGLLGPTIQAEVYDTVVITLKNMASHPVSLHAVGVSYWKASEGAEYDDQTSQREKEDDKVFPGGSHTYVWQVLKENGPMASDPLCLTYSYLSHVDLVKDLNSGLIGALLVCREGSLAKEKTQTLHKFILLFAVFDEGKSWHSETKNSLMQDRDAASARAWPKMHTVNGYVNRSLPGLIGCHRKSVYWHVIGMGTTPEVHSIFLEGHTFLVRNHRQASLEISPITFLTAQTLLMDLGQFLLFCHISSHQHDGMEAYVKVDSCPEEPQLRMKNNEEAEDYDDDLTDSEMDVVRFDDDNSPSFIQIRSVAKKHPKTWVHYIAAEEEDWDYAPLVLAPDDRSYKSQYLNNGPQRIGRKYKKVRFMAYTDETFKTREAIQHESGILGPLLYGEVGDTLLIIFKNQASRPYNIYPHGITDVRPLYSRRLPKGVKHLKDFPILPGEIFKYKWTVTVEDGPTKSDPRCLTRYYSSFVNMERDLASGLIGPLLICYKESVDQRGNQIMSDKRNVILFSVFDENRSWYLTENIQRFLPNPAGVQLEDPEFQASNIMHSINGYVFDSLQLSVCLHEVAYWYILSIGAQTDFLSVFFSGYTFKHKMVYEDTLTLFPFSGETVFMSMENPGLWILGCHNSDFRNRGMTALLKVSSCDKNTGDYYEDSYEDISAYLLSKNNAIEPRSFSQNPPVLKRHQREITRTTLQGAPGTPGSGTASSSPGASPGTSSTGSPGASPGTSSTGSPGASPGTSSTGSPGSSPSASTGTGPGTPGSGTASSSPGASPGTSSTGSPGASPGTSSTGSPGASPGTSSTGSPGSSTPSGATGSPGSSTPSGATGSPGASPGTSSTGSPASSSDQEEIDYDDTISVEMKKEDFDIYDEDENQSPRSFQKKTRHYFIAAVERLWDYGMSSSPHVLRNRAQSGSVPQFKKVVFQEFTDGSFTQPLYRGELNEHLGLLGPYIRAEVEDNIMVTFRNQASRPYSFYSSLISYEEDQRQGAEPRKNFVKPNETKTYFWKVQHHMAPTKDEFDCKAWAYFSDVDLEKDVHSGLIGPLLVCHTNTLNPAHGRQVTVQEFALFFTIFDETKSWYFTENMERNCRGAPTSESATPESGPGSEPATSGSETPGTSESATPESGPGSEPATSGSETPGTSESATPESGPGTSTEPSEGSAPGTSESATPESGPGSPAGSPTSTEEGSPAGSPTSTEEGSPAGSPTSTEEGTSESATPESGPGTSTEPSEGSAPGASSAPCNIQMEDPTFKENYRFHAINGYIMDTLPGLVMAQDQRIRWYLLSMGSNENIHSIHFSGHVFTVRKKEEYKMALYNLYPGVFETVEMLPSKAGIWRVECLIGEHLHAGMSTLFLVYSNKCQTPLGMASGHIRDFQITASGQYGQWAPKLARLHYSGSINAWSTKEPFSWIKVDLLAPMIIHGIKTQGARQKFSSLYISQFIIMYSLDGKKWQTYRGNSTGTLMVFFGNVDSSGIKHNIFNPPIIARYIRLHPTHYSIRSTLRMELMGCDLNSCSMPLGMESKAISDAQITASSYFTNMFATWSPSKARLHLQGRSNAWRPQVNNPKEWLQVDFQKTMKVTGVTTQGVKSLLTSMYVKEFLISSSQDGHQWTLFFQNGKVKVFQGNQDSFTPVVNSLDPPLLTRYLRIHPQSWVHQIALRMEVLGCEAQDLYDKTHTCPPCPAPELLGGPSVFLFPPKPKDTLMISRTPEVTCVVVDVSHEDPEVKFNWYVDGVEVHNAKTKPREEQYNSTYRVVSVLTVLHQDWLNGKEYKCKVSNKALPAPIEKTISKAKGQPREPQVYTLPPSRDELTKNQVSLTCLVKGFYPSDIAVEWESNGQPENNYKTTPPVLDSDGSFFLYSKLTVDKSRWQQGNVFSCSVMHEALHNHYTQKSLSLSPGK

SEQ ID NO: 75 - protein, 1984 aa, Artificial Sequence
  FVIII 199 (single chain FVIIIFc with three 144 AE XTENs at amino acid 1656 and 1900)
MQIELSTCFFLCLLRFCFSATRRYYLGAVELSWDYMQSDLGELPVDARFPPRVPKSFPFNTSVVYKKTLFVEFTDHLFNIAKPRPPWMGLLGPTIQAEVYDTVVITLKNMASHPVSLHAVGVSYWKASEGAEYDDQTSQREKEDDKVFPGGSHTYVWQVLKENGPMASDPLCLTYSYLSHVDLVKDLNSGLIGALLVCREGSLAKEKTQTLHKFILLFAVFDEGKSWHSETKNSLMQDRDAASARAWPKMHTVNGYVNRSLPGLIGCHRKSVYWHVIGMGTTPEVHSIFLEGHTFLVRNHRQASLEISPITFLTAQTLLMDLGQFLLFCHISSHQHDGMEAYVKVDSCPEEPQLRMKNNEEAEDYDDDLTDSEMDVVRFDDDNSPSFIQIRSVAKKHPKTWVHYIAAEEEDWDYAPLVLAPDDRSYKSQYLNNGPQRIGRKYKKVRFMAYTDETFKTREAIQHESGILGPLLYGEVGDTLLIIFKNQASRPYNIYPHGITDVRPLYSRRLPKGVKHLKDFPILPGEIFKYKWTVTVEDGPTKSDPRCLTRYYSSFVNMERDLASGLIGPLLICYKESVDQRGNQIMSDKRNVILFSVFDENRSWYLTENIQRFLPNPAGVQLEDPEFQASNIMHSINGYVFDSLQLSVCLHEVAYWYILSIGAQTDFLSVFFSGYTFKHKMVYEDTLTLFPFSGETVFMSMENPGLWILGCHNSDFRNRGMTALLKVSSCDKNTGDYYEDSYEDISAYLLSKNNAIEPRSFSQNPPVLKRHQAEITRTTLQGAPGTPGSGTASSSPGASPGTSSTGSPGASPGTSSTGSPGASPGTSSTGSPGSSPSASTGTGPGTPGSGTASSSPGASPGTSSTGSPGASPGTSSTGSPGASPGTSSTGSPGSSTPSGATGSPGSSTPSGATGSPGASPGTSSTGSPASSSDQEEIDYDDTISVEMKKEDFDIYDEDENQSPRSFQKKTRHYFIAAVERLWDYGMSSSPHVLRNRAQSGSVPQFKKVVFQEFTDGSFTQPLYRGELNEHLGLLGPYIRAEVEDNIMVTFRNQASRPYSFYSSLISYEEDQRQGAEPRKNFVKPNETKTYFWKVQHHMAPTKDEFDCKAWAYFSDVDLEKDVHSGLIGPLLVCHTNTLNPAHGRQVTVQEFALFFTIFDETKSWYFTENMERNCRGAPTSESATPESGPGSEPATSGSETPGTSESATPESGPGSEPATSGSETPGTSESATPESGPGTSTEPSEGSAPGTSESATPESGPGSPAGSPTSTEEGSPAGSPTSTEEGSPAGSPTSTEEGTSESATPESGPGTSTEPSEGSAPGASSAPCNIQMEDPTFKENYRFHAINGYIMDTLPGLVMAQDQRIRWYLLSMGSNENIHSIHFSGHVFTVRKKEEYKMALYNLYPGVFETVEMLPSKAGIWRVECLIGEHLHAGMSTLFLVYSNKCQTPLGMASGHIRDFQITASGQYGQWAPKLARLHYSGSINAWSTKEPFSWIKVDLLAPMIIHGIKTQGARQKFSSLYISQFIIMYSLDGKKWQTYRGNSTGTLMVFFGNVDSSGIKHNIFNPPIIARYIRLHPTHYSIRSTLRMELMGCDLNSCSMPLGMESKAISDAQITASSYFTNMFATWSPSKARLHLQGRSNAWRPQVNNPKEWLQVDFQKTMKVTGVTTQGVKSLLTSMYVKEFLISSSQDGHQWTLFFQNGKVKVFQGNQDSFTPVVNSLDPPLLTRYLRIHPQSWVHQIALRMEVLGCEAQDLYDKTHTCPPCPAPELLGGPSVFLFPPKPKDTLMISRTPEVTCVVVDVSHEDPEVKFNWYVDGVEVHNAKTKPREEQYNSTYRVVSVLTVLHQDWLNGKEYKCKVSNKALPAPIEKTISKAKGQPREPQVYTLPPSRDELTKNQVSLTCLVKGFYPSDIAVEWESNGQPENNYKTTPPVLDSDGSFFLYSKLTVDKSRWQQGNVFSCSVMHEALHNHYTQKSLSLSPGK

SEQ ID NO: 76 - protein, 2134 aa, Artificial Sequence
  FVIII 201 (single chain FVIIIFc with three 144 AE XTENs at amino acid 26, 1656 &1900)
MQIELSTCFFLCLLRFCFSATRRYYLGAVELSWDYMQSDLGELPVGAPGSSPSASTGTGPGSSPSASTGTGPGASPGTSSTGSPGASPGTSSTGSPGSSTPSGATGSPGSSPSASTGTGPGASPGTSSTGSPGSSPSASTGTGPGTPGSGTASSSPGSSTPSGATGSPGSSTPSGATGSPGASPGTSSTGSPASSDARFPPRVPKSFPFNTSVVYKKTLFVEFTDHLFNIAKPRPPWMGLLGPTIQAEVYDTVVITLKNMASHPVSLHAVGVSYWKASEGAEYDDQTSQREKEDDKVFPGGSHTYVWQVLKENGPMASDPLCLTYSYLSHVDLVKDLNSGLIGALLVCREGSLAKEKTQTLHKFILLFAVFDEGKSWHSETKNSLMQDRDAASARAWPKMHTVNGYVNRSLPGLIGCHRKSVYWHVIGMGTTPEVHSIFLEGHTFLVRNHRQASLEISPITFLTAQTLLMDLGQFLLFCHISSHQHDGMEAYVKVDSCPEEPQLRMKNNEEAEDYDDDLTDSEMDVVRFDDDNSPSFIQIRSVAKKHPKTWVHYIAAEEEDWDYAPLVLAPDDRSYKSQYLNNGPQRIGRKYKKVRFMAYTDETFKTREAIQHESGILGPLLYGEVGDTLLIIFKNQASRPYNIYPHGITDVRPLYSRRLPKGVKHLKDFPILPGEIFKYKWTVTVEDGPTKSDPRCLTRYYSSFVNMERDLASGLIGPLLICYKESVDQRGNQIMSDKRNVILFSVFDENRSWYLTENIQRFLPNPAGVQLEDPEFQASNIMHSINGYVFDSLQLSVCLHEVAYWYILSIGAQTDFLSVFFSGYTFKHKMVYEDTLTLFPFSGETVFMSMENPGLWILGCHNSDFRNRGMTALLKVSSCDKNTGDYYEDSYEDISAYLLSKNNAIEPRSFSQNPPVLKRHQAEITRTTLQGAPGTPGSGTASSSPGASPGTSSTGSPGASPGTSSTGSPGASPGTSSTGSPGSSPSASTGTGPGTPGSGTASSSPGASPGTSSTGSPGASPGTSSTGSPGASPGTSSTGSPGSSTPSGATGSPGSSTPSGATGSPGASPGTSSTGSPASSSDQEEIDYDDTISVEMKKEDFDIYDEDENQSPRSFQKKTRHYFIAAVERLWDYGMSSSPHVLRNRAQSGSVPQFKKVVFQEFTDGSFTQPLYRGELNEHLGLLGPYIRAEVEDNIMVTFRNQASRPYSFYSSLISYEEDQRQGAEPRKNFVKPNETKTYFWKVQHHMAPTKDEFDCKAWAYFSDVDLEKDVHSGLIGPLLVCHTNTLNPAHGRQVTVQEFALFFTIFDETKSWYFTENMERNCRGAPTSESATPESGPGSEPATSGSETPGTSESATPESGPGSEPATSGSETPGTSESATPESGPGTSTEPSEGSAPGTSESATPESGPGSPAGSPTSTEEGSPAGSPTSTEEGSPAGSPTSTEEGTSESATPESGPGTSTEPSEGSAPGASSAPCNIQMEDPTFKENYRFHAINGYIMDTLPGLVMAQDQRIRWYLLSMGSNENIHSIHFSGHVFTVRKKEEYKMALYNLYPGVFETVEMLPSKAGIWRVECLIGEHLHAGMSTLFLVYSNKCQTPLGMASGHIRDFQITASGQYGQWAPKLARLHYSGSINAWSTKEPFSWIKVDLLAPMIIHGIKTQGARQKFSSLYISQFIIMYSLDGKKWQTYRGNSTGTLMVFFGNVDSSGIKHNIFNPPIIARYIRLHPTHYSIRSTLRMELMGCDLNSCSMPLGMESKAISDAQITASSYFTNMFATWSPSKARLHLQGRSNAWRPQVNNPKEWLQVDFQKTMKVTGVTTQGVKSLLTSMYVKEFLISSSQDGHQWTLFFQNGKVKVFQGNQDSFTPVVNSLDPPLLTRYLRIHPQSWVHQIALRMEVLGCEAQDLYDKTHTCPPCPAPELLGGPSVFLFPPKPKDTLMISRTPEVTCVVVDVSHEDPEVKFNWYVDGVEVHNAKTKPREEQYNSTYRVVSVLTVLHQDWLNGKEYKCKVSNKALPAPIEKTISKAKGQPREPQVYTLPPSRDELTKNQVSLTCLVKGFYPSDIAVEWESNGQPENNYKTTPPVLDSDGSFFLYSKLTVDKSRWQQGNVFSCSVMHEALHNHYTQKSLSLSPGK

SEQ ID NO: 77 - protein, 2128 aa, Artificial Sequence
  FVIII 203 (single chain FVIIIFc with two AE XTENs, one 288AE XTEN in B-domain and one 144 AE XTEN at amino acid 1900)
MQIELSTCFFLCLLRFCFSATRRYYLGAVELSWDYMQSDLGELPVDARFPPRVPKSFPFNTSVVYKKTLFVEFTDHLFNIAKPRPPWMGLLGPTIQAEVYDTVVITLKNMASHPVSLHAVGVSYWKASEGAEYDDQTSQREKEDDKVFPGGSHTYVWQVLKENGPMASDPLCLTYSYLSHVDLVKDLNSGLIGALLVCREGSLAKEKTQTLHKFILLFAVFDEGKSWHSETKNSLMQDRDAASARAWPKMHTVNGYVNRSLPGLIGCHRKSVYWHVIGMGTTPEVHSIFLEGHTFLVRNHRQASLEISPITFLTAQTLLMDLGQFLLFCHISSHQHDGMEAYVKVDSCPEEPQLRMKNNEEAEDYDDDLTDSEMDVVRFDDDNSPSFIQIRSVAKKHPKTWVHYIAAEEEDWDYAPLVLAPDDRSYKSQYLNNGPQRIGRKYKKVRFMAYTDETFKTREAIQHESGILGPLLYGEVGDTLLIIFKNQASRPYNIYPHGITDVRPLYSRRLPKGVKHLKDFPILPGEIFKYKWTVTVEDGPTKSDPRCLTRYYSSFVNMERDLASGLIGPLLICYKESVDQRGNQIMSDKRNVILFSVFDENRSWYLTENIQRFLPNPAGVQLEDPEFQASNIMHSINGYVFDSLQLSVCLHEVAYWYILSIGAQTDFLSVFFSGYTFKHKMVYEDTLTLFPFSGETVFMSMENPGLWILGCHNSDFRNRGMTALLKVSSCDKNTGDYYEDSYEDISAYLLSKNNAIEPRSFSQNGAPGTSESATPESGPGSEPATSGSETPGTSESATPESGPGSEPATSGSETPGTSESATPESGPGTSTEPSEGSAPGSPAGSPTSTEEGTSESATPESGPGSEPATSGSETPGTSESATPESGPGSPAGSPTSTEEGSPAGSPTSTEEGTSTEPSEGSAPGTSESATPESGPGTSESATPESGPGTSESATPESGPGSEPATSGSETPGSEPATSGSETPGSPAGSPTSTEEGTSTEPSEGSAPGTSTEPSEGSAPGSEPATSGSETPGTSESATPESGPGTSTEPSEGSAPASSPPVLKRHQAEITRTTLQSDQEEIDYDDTISVEMKKEDFDIYDEDENQSPRSFQKKTRHYFIAAVERLWDYGMSSSPHVLRNRAQSGSVPQFKKVVFQEFTDGSFTQPLYRGELNEHLGLLGPYIRAEVEDNIMVTFRNQASRPYSFYSSLISYEEDQRQGAEPRKNFVKPNETKTYFWKVQHHMAPTKDEFDCKAWAYFSDVDLEKDVHSGLIGPLLVCHTNTLNPAHGRQVTVQEFALFFTIFDETKSWYFTENMERNCRGAPTSESATPESGPGSEPATSGSETPGTSESATPESGPGSEPATSGSETPGTSESATPESGPGTSTEPSEGSAPGTSESATPESGPGSPAGSPTSTEEGSPAGSPTSTEEGSPAGSPTSTEEGTSESATPESGPGTSTEPSEGSAPGASSAPCNIQMEDPTFKENYRFHAINGYIMDTLPGLVMAQDQRIRWYLLSMGSNENIHSIHFSGHVFTVRKKEEYKMALYNLYPGVFETVEMLPSKAGIWRVECLIGEHLHAGMSTLFLVYSNKCQTPLGMASGHIRDFQITASGQYGQWAPKLARLHYSGSINAWSTKEPFSWIKVDLLAPMIIHGIKTQGARQKFSSLYISQFIIMYSLDGKKWQTYRGNSTGTLMVFFGNVDSSGIKHNIFNPPIIARYIRLHPTHYSIRSTLRMELMGCDLNSCSMPLGMESKAISDAQITASSYFTNMFATWSPSKARLHLQGRSNAWRPQVNNPKEWLQVDFQKTMKVTGVTTQGVKSLLTSMYVKEFLISSSQDGHQWTLFFQNGKVKVFQGNQDSFTPVVNSLDPPLLTRYLRIHPQSWVHQIALRMEVLGCEAQDLYDKTHTCPPCPAPELLGGPSVFLFPPKPKDTLMISRTPEVTCVVVDVSHEDPEVKFNWYVDGVEVHNAKTKPREEQYNSTYRVVSVLTVLHQDWLNGKEYKCKVSNKALPAPIEKTISKAKGQPREPQVYTLPPSRDELTKNQVSLTCLVKGFYPSDIAVEWESNGQPENNYKTTPPVLDSDGSFFLYSKLTVDKSRWQQGNVFSCSVMHEALHNHYTQKSLSLSPGK

SEQ ID NO: 78 - protein, 2128 aa, Artificial Sequence
  FVIII 204 (single chain FVIIIFc with two AE XTENs, one 288AE XTEN in B-domain and one 144 AE XTEN at amino acid 403)
MQIELSTCFFLCLLRFCFSATRRYYLGAVELSWDYMQSDLGELPVDARFPPRVPKSFPFNTSVVYKKTLFVEFTDHLFNIAKPRPPWMGLLGPTIQAEVYDTVVITLKNMASHPVSLHAVGVSYWKASEGAEYDDQTSQREKEDDKVFPGGSHTYVWQVLKENGPMASDPLCLTYSYLSHVDLVKDLNSGLIGALLVCREGSLAKEKTQTLHKFILLFAVFDEGKSWHSETKNSLMQDRDAASARAWPKMHTVNGYVNRSLPGLIGCHRKSVYWHVIGMGTTPEVHSIFLEGHTFLVRNHRQASLEISPITFLTAQTLLMDLGQFLLFCHISSHQHDGMEAYVKVDSCPEEPQLRMKNNEEAEDYDDDLTDSEMDVVRFDDDNSPSFIQIRSVAKKHPKTWVHYIAAEEEDWDYAPLVLAPDGAPTSTEPSEGSAPGSPAGSPTSTEEGTSTEPSEGSAPGTSTEPSEGSAPGTSESATPESGPGTSTEPSEGSAPGTSESATPESGPGSEPATSGSETPGTSTEPSEGSAPGTSTEPSEGSAPGTSESATPESGPGTSESATPESGPGASSDRSYKSQYLNNGPQRIGRKYKKVRFMAYTDETFKTREAIQHESGILGPLLYGEVGDTLLIIFKNQASRPYNIYPHGITDVRPLYSRRLPKGVKHLKDFPILPGEIFKYKWTVTVEDGPTKSDPRCLTRYYSSFVNMERDLASGLIGPLLICYKESVDQRGNQIMSDKRNVILFSVFDENRSWYLTENIQRFLPNPAGVQLEDPEFQASNIMHSINGYVFDSLQLSVCLHEVAYWYILSIGAQTDFLSVFFSGYTFKHKMVYEDTLTLFPFSGETVFMSMENPGLWILGCHNSDFRNRGMTALLKVSSCDKNTGDYYEDSYEDISAYLLSKNNAIEPRSFSQNGAPGTSESATPESGPGSEPATSGSETPGTSESATPESGPGSEPATSGSETPGTSESATPESGPGTSTEPSEGSAPGSPAGSPTSTEEGTSESATPESGPGSEPATSGSETPGTSESATPESGPGSPAGSPTSTEEGSPAGSPTSTEEGTSTEPSEGSAPGTSESATPESGPGTSESATPESGPGTSESATPESGPGSEPATSGSETPGSEPATSGSETPGSPAGSPTSTEEGTSTEPSEGSAPGTSTEPSEGSAPGSEPATSGSETPGTSESATPESGPGTSTEPSEGSAPASSPPVLKRHQAEITRTTLQSDQEEIDYDDTISVEMKKEDFDIYDEDENQSPRSFQKKTRHYFIAAVERLWDYGMSSSPHVLRNRAQSGSVPQFKKVVFQEFTDGSFTQPLYRGELNEHLGLLGPYIRAEVEDNIMVTFRNQASRPYSFYSSLISYEEDQRQGAEPRKNFVKPNETKTYFWKVQHHMAPTKDEFDCKAWAYFSDVDLEKDVHSGLIGPLLVCHTNTLNPAHGRQVTVQEFALFFTIFDETKSWYFTENMERNCRAPCNIQMEDPTFKENYRFHAINGYIMDTLPGLVMAQDQRIRWYLLSMGSNENIHSIHFSGHVFTVRKKEEYKMALYNLYPGVFETVEMLPSKAGIWRVECLIGEHLHAGMSTLFLVYSNKCQTPLGMASGHIRDFQITASGQYGQWAPKLARLHYSGSINAWSTKEPFSWIKVDLLAPMIIHGIKTQGARQKFSSLYISQFIIMYSLDGKKWQTYRGNSTGTLMVFFGNVDSSGIKHNIFNPPIIARYIRLHPTHYSIRSTLRMELMGCDLNSCSMPLGMESKAISDAQITASSYFTNMFATWSPSKARLHLQGRSNAWRPQVNNPKEWLQVDFQKTMKVTGVTTQGVKSLLTSMYVKEFLISSSQDGHQWTLFFQNGKVKVFQGNQDSFTPVVNSLDPPLLTRYLRIHPQSWVHQIALRMEVLGCEAQDLYDKTHTCPPCPAPELLGGPSVFLFPPKPKDTLMISRTPEVTCVVVDVSHEDPEVKFNWYVDGVEVHNAKTKPREEQYNSTYRVVSVLTVLHQDWLNGKEYKCKVSNKALPAPIEKTISKAKGQPREPQVYTLPPSRDELTKNQVSLTCLVKGFYPSDIAVEWESNGQPENNYKTTPPVLDSDGSFFLYSKLTVDKSRWQQGNVFSCSVMHEALHNHYTQKSLSLSPGK

SEQ ID NO: 79 - protein, 2128 aa, Artificial Sequence
  FVIII 205 (single chain FVIIIFc with two AE XTEN, one 288AE XTEN in B-domain and one 144 AE XTEN at amino acid 18)
MQIELSTCFFLCLLRFCFSATRRYYLGAVELSWDYMQGAPTSESATPESGPGSEPATSGSETPGTSESATPESGPGSEPATSGSETPGTSESATPESGPGTSTEPSEGSAPGSPAGSPTSTEEGTSESATPESGPGSEPATSGSETPGTSESATPESGPGSPAGSPTSTEEGSPAGSPTSTEEGASSSDLGELPVDARFPPRVPKSFPFNTSVVYKKTLFVEFTDHLFNIAKPRPPWMGLLGPTIQAEVYDTVVITLKNMASHPVSLHAVGVSYWKASEGAEYDDQTSQREKEDDKVFPGGSHTYVWQVLKENGPMASDPLCLTYSYLSHVDLVKDLNSGLIGALLVCREGSLAKEKTQTLHKFILLFAVFDEGKSWHSETKNSLMQDRDAASARAWPKMHTVNGYVNRSLPGLIGCHRKSVYWHVIGMGTTPEVHSIFLEGHTFLVRNHRQASLEISPITFLTAQTLLMDLGQFLLFCHISSHQHDGMEAYVKVDSCPEEPQLRMKNNEEAEDYDDDLTDSEMDVVRFDDDNSPSFIQIRSVAKKHPKTWVHYIAAEEEDWDYAPLVLAPDDRSYKSQYLNNGPQRIGRKYKKVRFMAYTDETFKTREAIQHESGILGPLLYGEVGDTLLIIFKNQASRPYNIYPHGITDVRPLYSRRLPKGVKHLKDFPILPGEIFKYKWTVTVEDGPTKSDPRCLTRYYSSFVNMERDLASGLIGPLLICYKESVDQRGNQIMSDKRNVILFSVFDENRSWYLTENIQRFLPNPAGVQLEDPEFQASNIMHSINGYVFDSLQLSVCLHEVAYWYILSIGAQTDFLSVFFSGYTFKHKMVYEDTLTLFPFSGETVFMSMENPGLWILGCHNSDFRNRGMTALLKVSSCDKNTGDYYEDSYEDISAYLLSKNNAIEPRSFSQNGAPGTSESATPESGPGSEPATSGSETPGTSESATPESGPGSEPATSGSETPGTSESATPESGPGTSTEPSEGSAPGSPAGSPTSTEEGTSESATPESGPGSEPATSGSETPGTSESATPESGPGSPAGSPTSTEEGSPAGSPTSTEEGTSTEPSEGSAPGTSESATPESGPGTSESATPESGPGTSESATPESGPGSEPATSGSETPGSEPATSGSETPGSPAGSPTSTEEGTSTEPSEGSAPGTSTEPSEGSAPGSEPATSGSETPGTSESATPESGPGTSTEPSEGSAPASSPPVLKRHQAEITRTTLQSDQEEIDYDDTISVEMKKEDFDIYDEDENQSPRSFQKKTRHYFIAAVERLWDYGMSSSPHVLRNRAQSGSVPQFKKVVFQEFTDGSFTQPLYRGELNEHLGLLGPYIRAEVEDNIMVTFRNQASRPYSFYSSLISYEEDQRQGAEPRKNFVKPNETKTYFWKVQHHMAPTKDEFDCKAWAYFSDVDLEKDVHSGLIGPLLVCHTNTLNPAHGRQVTVQEFALFFTIFDETKSWYFTENMERNCRAPCNIQMEDPTFKENYRFHAINGYIMDTLPGLVMAQDQRIRWYLLSMGSNENIHSIHFSGHVFTVRKKEEYKMALYNLYPGVFETVEMLPSKAGIWRVECLIGEHLHAGMSTLFLVYSNKCQTPLGMASGHIRDFQITASGQYGQWAPKLARLHYSGSINAWSTKEPFSWIKVDLLAPMIIHGIKTQGARQKFSSLYISQFIIMYSLDGKKWQTYRGNSTGTLMVFFGNVDSSGIKHNIFNPPIIARYIRLHPTHYSIRSTLRMELMGCDLNSCSMPLGMESKAISDAQITASSYFTNMFATWSPSKARLHLQGRSNAWRPQVNNPKEWLQVDFQKTMKVTGVTTQGVKSLLTSMYVKEFLISSSQDGHQWTLFFQNGKVKVFQGNQDSFTPVVNSLDPPLLTRYLRIHPQSWVHQIALRMEVLGCEAQDLYDKTHTCPPCPAPELLGGPSVFLFPPKPKDTLMISRTPEVTCVVVDVSHEDPEVKFNWYVDGVEVHNAKTKPREEQYNSTYRVVSVLTVLHQDWLNGKEYKCKVSNKALPAPIEKTISKAKGQPREPQVYTLPPSRDELTKNQVSLTCLVKGFYPSDIAVEWESNGQPENNYKTTPPVLDSDGSFFLYSKLTVDKSRWQQGNVFSCSVMHEALHNHYTQKSLSLSPGK

SEQ ID NO: 80 - protein, 2020 aa, Artificial Sequence
  pSYN FVIII 266  (FVIII Fc with 42 AE-XTEN at amino acid 18 and 288 AE XTEN in B-domain)
MQIELSTCFFLCLLRFCFSATRRYYLGAVELSWDYMQGAPGSPAGSPTSTEEGTSESATPESGPGSEPATSGSETPASSSDLGELPVDARFPPRVPKSFPFNTSVVYKKTLFVEFTDHLFNIAKPRPPWMGLLGPTIQAEVYDTVVITLKNMASHPVSLHAVGVSYWKASEGAEYDDQTSQREKEDDKVFPGGSHTYVWQVLKENGPMASDPLCLTYSYLSHVDLVKDLNSGLIGALLVCREGSLAKEKTQTLHKFILLFAVFDEGKSWHSETKNSLMQDRDAASARAWPKMHTVNGYVNRSLPGLIGCHRKSVYWHVIGMGTTPEVHSIFLEGHTFLVRNHRQASLEISPITFLTAQTLLMDLGQFLLFCHISSHQHDGMEAYVKVDSCPEEPQLRMKNNEEAEDYDDDLTDSEMDVVRFDDDNSPSFIQIRSVAKKHPKTWVHYIAAEEEDWDYAPLVLAPDDRSYKSQYLNNGPQRIGRKYKKVRFMAYTDETFKTREAIQHESGILGPLLYGEVGDTLLIIFKNQASRPYNIYPHGITDVRPLYSRRLPKGVKHLKDFPILPGEIFKYKWTVTVEDGPTKSDPRCLTRYYSSFVNMERDLASGLIGPLLICYKESVDQRGNQIMSDKRNVILFSVFDENRSWYLTENIQRFLPNPAGVQLEDPEFQASNIMHSINGYVFDSLQLSVCLHEVAYWYILSIGAQTDFLSVFFSGYTFKHKMVYEDTLTLFPFSGETVFMSMENPGLWILGCHNSDFRNRGMTALLKVSSCDKNTGDYYEDSYEDISAYLLSKNNAIEPRSFSQNGAPGTSESATPESGPGSEPATSGSETPGTSESATPESGPGSEPATSGSETPGTSESATPESGPGTSTEPSEGSAPGSPAGSPTSTEEGTSESATPESGPGSEPATSGSETPGTSESATPESGPGSPAGSPTSTEEGSPAGSPTSTEEGTSTEPSEGSAPGTSESATPESGPGTSESATPESGPGTSESATPESGPGSEPATSGSETPGSEPATSGSETPGSPAGSPTSTEEGTSTEPSEGSAPGTSTEPSEGSAPGSEPATSGSETPGTSESATPESGPGTSTEPSEGSAPASSPPVLKRHQAEITRTTLQSDQEEIDYDDTISVEMKKEDFDIYDEDENQSPRSFQKKTRHYFIAAVERLWDYGMSSSPHVLRNRAQSGSVPQFKKVVFQEFTDGSFTQPLYRGELNEHLGLLGPYIRAEVEDNIMVTFRNQASRPYSFYSSLISYEEDQRQGAEPRKNFVKPNETKTYFWKVQHHMAPTKDEFDCKAWAYFSDVDLEKDVHSGLIGPLLVCHTNTLNPAHGRQVTVQEFALFFTIFDETKSWYFTENMERNCRAPCNIQMEDPTFKENYRFHAINGYIMDTLPGLVMAQDQRIRWYLLSMGSNENIHSIHFSGHVFTVRKKEEYKMALYNLYPGVFETVEMLPSKAGIWRVECLIGEHLHAGMSTLFLVYSNKCQTPLGMASGHIRDFQITASGQYGQWAPKLARLHYSGSINAWSTKEPFSWIKVDLLAPMIIHGIKTQGARQKFSSLYISQFIIMYSLDGKKWQTYRGNSTGTLMVFFGNVDSSGIKHNIFNPPIIARYIRLHPTHYSIRSTLRMELMGCDLNSCSMPLGMESKAISDAQITASSYFTNMFATWSPSKARLHLQGRSNAWRPQVNNPKEWLQVDFQKTMKVTGVTTQGVKSLLTSMYVKEFLISSSQDGHQWTLFFQNGKVKVFQGNQDSFTPVVNSLDPPLLTRYLRIHPQSWVHQIALRMEVLGCEAQDLYDKTHTCPPCPAPELLGGPSVFLFPPKPKDTLMISRTPEVTCVVVDVSHEDPEVKFNWYVDGVEVHNAKTKPREEQYNSTYRVVSVLTVLHQDWLNGKEYKCKVSNKALPAPIEKTISKAKGQPREPQVYTLPPSRDELTKNQVSLTCLVKGFYPSDIAVEWESNGQPENNYKTTPPVLDSDGSFFLYSKLTVDKSRWQQGNVFSCSVMHEALHNHYTQKSLSLSPGK

SEQ ID NO: 81 - protein, 2056 aa, Artificial Sequence
  pSYN FVIII 267 (FVIII Fc with 72 AE-XTEN at amino acid  18 and 288 AE XTEN in B-domain)
MQIELSTCFFLCLLRFCFSATRRYYLGAVELSWDYMQGAPTSESATPESGPGSEPATSGSETPGTSESATPESGPGSEPATSGSETPGTSESATPESGPGTSTEPSEGSAPGASSSDLGELPVDARFPPRVPKSFPFNTSVVYKKTLFVEFTDHLFNIAKPRPPWMGLLGPTIQAEVYDTVVITLKNMASHPVSLHAVGVSYWKASEGAEYDDQTSQREKEDDKVFPGGSHTYVWQVLKENGPMASDPLCLTYSYLSHVDLVKDLNSGLIGALLVCREGSLAKEKTQTLHKFILLFAVFDEGKSWHSETKNSLMQDRDAASARAWPKMHTVNGYVNRSLPGLIGCHRKSVYWHVIGMGTTPEVHSIFLEGHTFLVRNHRQASLEISPITFLTAQTLLMDLGQFLLFCHISSHQHDGMEAYVKVDSCPEEPQLRMKNNEEAEDYDDDLTDSEMDVVRFDDDNSPSFIQIRSVAKKHPKTWVHYIAAEEEDWDYAPLVLAPDDRSYKSQYLNNGPQRIGRKYKKVRFMAYTDETFKTREAIQHESGILGPLLYGEVGDTLLIIFKNQASRPYNIYPHGITDVRPLYSRRLPKGVKHLKDFPILPGEIFKYKWTVTVEDGPTKSDPRCLTRYYSSFVNMERDLASGLIGPLLICYKESVDQRGNQIMSDKRNVILFSVFDENRSWYLTENIQRFLPNPAGVQLEDPEFQASNIMHSINGYVFDSLQLSVCLHEVAYWYILSIGAQTDFLSVFFSGYTFKHKMVYEDTLTLFPFSGETVFMSMENPGLWILGCHNSDFRNRGMTALLKVSSCDKNTGDYYEDSYEDISAYLLSKNNAIEPRSFSQNGAPGTSESATPESGPGSEPATSGSETPGTSESATPESGPGSEPATSGSETPGTSESATPESGPGTSTEPSEGSAPGSPAGSPTSTEEGTSESATPESGPGSEPATSGSETPGTSESATPESGPGSPAGSPTSTEEGSPAGSPTSTEEGTSTEPSEGSAPGTSESATPESGPGTSESATPESGPGTSESATPESGPGSEPATSGSETPGSEPATSGSETPGSPAGSPTSTEEGTSTEPSEGSAPGTSTEPSEGSAPGSEPATSGSETPGTSESATPESGPGTSTEPSEGSAPASSPPVLKRHQAEITRTTLQSDQEEIDYDDTISVEMKKEDFDIYDEDENQSPRSFQKKTRHYFIAAVERLWDYGMSSSPHVLRNRAQSGSVPQFKKVVFQEFTDGSFTQPLYRGELNEHLGLLGPYIRAEVEDNIMVTFRNQASRPYSFYSSLISYEEDQRQGAEPRKNFVKPNETKTYFWKVQHHMAPTKDEFDCKAWAYFSDVDLEKDVHSGLIGPLLVCHTNTLNPAHGRQVTVQEFALFFTIFDETKSWYFTENMERNCRAPCNIQMEDPTFKENYRFHAINGYIMDTLPGLVMAQDQRIRWYLLSMGSNENIHSIHFSGHVFTVRKKEEYKMALYNLYPGVFETVEMLPSKAGIWRVECLIGEHLHAGMSTLFLVYSNKCQTPLGMASGHIRDFQITASGQYGQWAPKLARLHYSGSINAWSTKEPFSWIKVDLLAPMIIHGIKTQGARQKFSSLYISQFIIMYSLDGKKWQTYRGNSTGTLMVFFGNVDSSGIKHNIFNPPIIARYIRLHPTHYSIRSTLRMELMGCDLNSCSMPLGMESKAISDAQITASSYFTNMFATWSPSKARLHLQGRSNAWRPQVNNPKEWLQVDFQKTMKVTGVTTQGVKSLLTSMYVKEFLISSSQDGHQWTLFFQNGKVKVFQGNQDSFTPVVNSLDPPLLTRYLRIHPQSWVHQIALRMEVLGCEAQDLYDKTHTCPPCPAPELLGGPSVFLFPPKPKDTLMISRTPEVTCVVVDVSHEDPEVKFNWYVDGVEVHNAKTKPREEQYNSTYRVVSVLTVLHQDWLNGKEYKCKVSNKALPAPIEKTISKAKGQPREPQVYTLPPSRDELTKNQVSLTCLVKGFYPSDIAVEWESNGQPENNYKTTPPVLDSDGSFFLYSKLTVDKSRWQQGNVFSCSVMHEALHNHYTQKSLSLSPGK

SEQ ID NO: 82 - protein, 1834 aa, Artificial Sequence
  pSYN FVIII 268 (FVIII Fc with 144 AE-XTEN at amino acid 18)
MQIELSTCFFLCLLRFCFSATRRYYLGAVELSWDYMQGAPTSESATPESGPGSEPATSGSETPGTSESATPESGPGSEPATSGSETPGTSESATPESGPGTSTEPSEGSAPGSPAGSPTSTEEGTSESATPESGPGSEPATSGSETPGTSESATPESGPGSPAGSPTSTEEGSPAGSPTSTEEGASSSDLGELPVDARFPPRVPKSFPFNTSVVYKKTLFVEFTDHLFNIAKPRPPWMGLLGPTIQAEVYDTVVITLKNMASHPVSLHAVGVSYWKASEGAEYDDQTSQREKEDDKVFPGGSHTYVWQVLKENGPMASDPLCLTYSYLSHVDLVKDLNSGLIGALLVCREGSLAKEKTQTLHKFILLFAVFDEGKSWHSETKNSLMQDRDAASARAWPKMHTVNGYVNRSLPGLIGCHRKSVYWHVIGMGTTPEVHSIFLEGHTFLVRNHRQASLEISPITFLTAQTLLMDLGQFLLFCHISSHQHDGMEAYVKVDSCPEEPQLRMKNNEEAEDYDDDLTDSEMDVVRFDDDNSPSFIQIRSVAKKHPKTWVHYIAAEEEDWDYAPLVLAPDDRSYKSQYLNNGPQRIGRKYKKVRFMAYTDETFKTREAIQHESGILGPLLYGEVGDTLLIIFKNQASRPYNIYPHGITDVRPLYSRRLPKGVKHLKDFPILPGEIFKYKWTVTVEDGPTKSDPRCLTRYYSSFVNMERDLASGLIGPLLICYKESVDQRGNQIMSDKRNVILFSVFDENRSWYLTENIQRFLPNPAGVQLEDPEFQASNIMHSINGYVFDSLQLSVCLHEVAYWYILSIGAQTDFLSVFFSGYTFKHKMVYEDTLTLFPFSGETVFMSMENPGLWILGCHNSDFRNRGMTALLKVSSCDKNTGDYYEDSYEDISAYLLSKNNAIEPRSFSQNPPVLKRHQAEITRTTLQSDQEEIDYDDTISVEMKKEDFDIYDEDENQSPRSFQKKTRHYFIAAVERLWDYGMSSSPHVLRNRAQSGSVPQFKKVVFQEFTDGSFTQPLYRGELNEHLGLLGPYIRAEVEDNIMVTFRNQASRPYSFYSSLISYEEDQRQGAEPRKNFVKPNETKTYFWKVQHHMAPTKDEFDCKAWAYFSDVDLEKDVHSGLIGPLLVCHTNTLNPAHGRQVTVQEFALFFTIFDETKSWYFTENMERNCRAPCNIQMEDPTFKENYRFHAINGYIMDTLPGLVMAQDQRIRWYLLSMGSNENIHSIHFSGHVFTVRKKEEYKMALYNLYPGVFETVEMLPSKAGIWRVECLIGEHLHAGMSTLFLVYSNKCQTPLGMASGHIRDFQITASGQYGQWAPKLARLHYSGSINAWSTKEPFSWIKVDLLAPMIIHGIKTQGARQKFSSLYISQFIIMYSLDGKKWQTYRGNSTGTLMVFFGNVDSSGIKHNIFNPPIIARYIRLHPTHYSIRSTLRMELMGCDLNSCSMPLGMESKAISDAQITASSYFTNMFATWSPSKARLHLQGRSNAWRPQVNNPKEWLQVDFQKTMKVTGVTTQGVKSLLTSMYVKEFLISSSQDGHQWTLFFQNGKVKVFQGNQDSFTPVVNSLDPPLLTRYLRIHPQSWVHQIALRMEVLGCEAQDLYDKTHTCPPCPAPELLGGPSVFLFPPKPKDTLMISRTPEVTCVVVDVSHEDPEVKFNWYVDGVEVHNAKTKPREEQYNSTYRVVSVLTVLHQDWLNGKEYKCKVSNKALPAPIEKTISKAKGQPREPQVYTLPPSRDELTKNQVSLTCLVKGFYPSDIAVEWESNGQPENNYKTTPPVLDSDGSFFLYSKLTVDKSRWQQGNVFSCSVMHEALHNHYTQKSLSLSPGK

SEQ ID NO: 83 - protein, 1762 aa, Artificial Sequence
  pSYN FVIII 269 (FVIII Fc with 72 AE-XTEN at amino acid 18)
MQIELSTCFFLCLLRFCFSATRRYYLGAVELSWDYMQGAPTSESATPESGPGSEPATSGSETPGTSESATPESGPGSEPATSGSETPGTSESATPESGPGTSTEPSEGSAPGASSSDLGELPVDARFPPRVPKSFPFNTSVVYKKTLFVEFTDHLFNIAKPRPPWMGLLGPTIQAEVYDTVVITLKNMASHPVSLHAVGVSYWKASEGAEYDDQTSQREKEDDKVFPGGSHTYVWQVLKENGPMASDPLCLTYSYLSHVDLVKDLNSGLIGALLVCREGSLAKEKTQTLHKFILLFAVFDEGKSWHSETKNSLMQDRDAASARAWPKMHTVNGYVNRSLPGLIGCHRKSVYWHVIGMGTTPEVHSIFLEGHTFLVRNHRQASLEISPITFLTAQTLLMDLGQFLLFCHISSHQHDGMEAYVKVDSCPEEPQLRMKNNEEAEDYDDDLTDSEMDVVRFDDDNSPSFIQIRSVAKKHPKTWVHYIAAEEEDWDYAPLVLAPDDRSYKSQYLNNGPQRIGRKYKKVRFMAYTDETFKTREAIQHESGILGPLLYGEVGDTLLIIFKNQASRPYNIYPHGITDVRPLYSRRLPKGVKHLKDFPILPGEIFKYKWTVTVEDGPTKSDPRCLTRYYSSFVNMERDLASGLIGPLLICYKESVDQRGNQIMSDKRNVILFSVFDENRSWYLTENIQRFLPNPAGVQLEDPEFQASNIMHSINGYVFDSLQLSVCLHEVAYWYILSIGAQTDFLSVFFSGYTFKHKMVYEDTLTLFPFSGETVFMSMENPGLWILGCHNSDFRNRGMTALLKVSSCDKNTGDYYEDSYEDISAYLLSKNNAIEPRSFSQNPPVLKRHQAEITRTTLQSDQEEIDYDDTISVEMKKEDFDIYDEDENQSPRSFQKKTRHYFIAAVERLWDYGMSSSPHVLRNRAQSGSVPQFKKVVFQEFTDGSFTQPLYRGELNEHLGLLGPYIRAEVEDNIMVTFRNQASRPYSFYSSLISYEEDQRQGAEPRKNFVKPNETKTYFWKVQHHMAPTKDEFDCKAWAYFSDVDLEKDVHSGLIGPLLVCHTNTLNPAHGRQVTVQEFALFFTIFDETKSWYFTENMERNCRAPCNIQMEDPTFKENYRFHAINGYIMDTLPGLVMAQDQRIRWYLLSMGSNENIHSIHFSGHVFTVRKKEEYKMALYNLYPGVFETVEMLPSKAGIWRVECLIGEHLHAGMSTLFLVYSNKCQTPLGMASGHIRDFQITASGQYGQWAPKLARLHYSGSINAWSTKEPFSWIKVDLLAPMIIHGIKTQGARQKFSSLYISQFIIMYSLDGKKWQTYRGNSTGTLMVFFGNVDSSGIKHNIFNPPIIARYIRLHPTHYSIRSTLRMELMGCDLNSCSMPLGMESKAISDAQITASSYFTNMFATWSPSKARLHLQGRSNAWRPQVNNPKEWLQVDFQKTMKVTGVTTQGVKSLLTSMYVKEFLISSSQDGHQWTLFFQNGKVKVFQGNQDSFTPVVNSLDPPLLTRYLRIHPQSWVHQIALRMEVLGCEAQDLYDKTHTCPPCPAPELLGGPSVFLFPPKPKDTLMISRTPEVTCVVVDVSHEDPEVKFNWYVDGVEVHNAKTKPREEQYNSTYRVVSVLTVLHQDWLNGKEYKCKVSNKALPAPIEKTISKAKGQPREPQVYTLPPSRDELTKNQVSLTCLVKGFYPSDIAVEWESNGQPENNYKTTPPVLDSDGSFFLYSKLTVDKSRWQQGNVFSCSVMHEALHNHYTQKSLSLSPGK

SEQ ID NO: 84 - protein, 1726 aa, Artificial Sequence
  pSYNFVIII  271 (FVIII Fc with 42 AE-XTEN at amino acid 18)
MQIELSTCFFLCLLRFCFSATRRYYLGAVELSWDYMQGAPGSPAGSPTSTEEGTSESATPESGPGSEPATSGSETPASSSDLGELPVDARFPPRVPKSFPFNTSVVYKKTLFVEFTDHLFNIAKPRPPWMGLLGPTIQAEVYDTVVITLKNMASHPVSLHAVGVSYWKASEGAEYDDQTSQREKEDDKVFPGGSHTYVWQVLKENGPMASDPLCLTYSYLSHVDLVKDLNSGLIGALLVCREGSLAKEKTQTLHKFILLFAVFDEGKSWHSETKNSLMQDRDAASARAWPKMHTVNGYVNRSLPGLIGCHRKSVYWHVIGMGTTPEVHSIFLEGHTFLVRNHRQASLEISPITFLTAQTLLMDLGQFLLFCHISSHQHDGMEAYVKVDSCPEEPQLRMKNNEEAEDYDDDLTDSEMDVVRFDDDNSPSFIQIRSVAKKHPKTWVHYIAAEEEDWDYAPLVLAPDDRSYKSQYLNNGPQRIGRKYKKVRFMAYTDETFKTREAIQHESGILGPLLYGEVGDTLLIIFKNQASRPYNIYPHGITDVRPLYSRRLPKGVKHLKDFPILPGEIFKYKWTVTVEDGPTKSDPRCLTRYYSSFVNMERDLASGLIGPLLICYKESVDQRGNQIMSDKRNVILFSVFDENRSWYLTENIQRFLPNPAGVQLEDPEFQASNIMHSINGYVFDSLQLSVCLHEVAYWYILSIGAQTDFLSVFFSGYTFKHKMVYEDTLTLFPFSGETVFMSMENPGLWILGCHNSDFRNRGMTALLKVSSCDKNTGDYYEDSYEDISAYLLSKNNAIEPRSFSQNPPVLKRHQAEITRTTLQSDQEEIDYDDTISVEMKKEDFDIYDEDENQSPRSFQKKTRHYFIAAVERLWDYGMSSSPHVLRNRAQSGSVPQFKKVVFQEFTDGSFTQPLYRGELNEHLGLLGPYIRAEVEDNIMVTFRNQASRPYSFYSSLISYEEDQRQGAEPRKNFVKPNETKTYFWKVQHHMAPTKDEFDCKAWAYFSDVDLEKDVHSGLIGPLLVCHTNTLNPAHGRQVTVQEFALFFTIFDETKSWYFTENMERNCRAPCNIQMEDPTFKENYRFHAINGYIMDTLPGLVMAQDQRIRWYLLSMGSNENIHSIHFSGHVFTVRKKEEYKMALYNLYPGVFETVEMLPSKAGIWRVECLIGEHLHAGMSTLFLVYSNKCQTPLGMASGHIRDFQITASGQYGQWAPKLARLHYSGSINAWSTKEPFSWIKVDLLAPMIIHGIKTQGARQKFSSLYISQFIIMYSLDGKKWQTYRGNSTGTLMVFFGNVDSSGIKHNIFNPPIIARYIRLHPTHYSIRSTLRMELMGCDLNSCSMPLGMESKAISDAQITASSYFTNMFATWSPSKARLHLQGRSNAWRPQVNNPKEWLQVDFQKTMKVTGVTTQGVKSLLTSMYVKEFLISSSQDGHQWTLFFQNGKVKVFQGNQDSFTPVVNSLDPPLLTRYLRIHPQSWVHQIALRMEVLGCEAQDLYDKTHTCPPCPAPELLGGPSVFLFPPKPKDTLMISRTPEVTCVVVDVSHEDPEVKFNWYVDGVEVHNAKTKPREEQYNSTYRVVSVLTVLHQDWLNGKEYKCKVSNKALPAPIEKTISKAKGQPREPQVYTLPPSRDELTKNQVSLTCLVKGFYPSDIAVEWESNGQPENNYKTTPPVLDSDGSFFLYSKLTVDKSRWQQGNVFSCSVMHEALHNHYTQKSLSLSPGK

SEQ ID NO: 85 - protein, 1901 aa, Artificial Sequence
  pSYN FVIII 272 ( FVIII with 144 AE XTEN at amino acid 18 and 244 AE XTEN in B-domain- no Fc)
MQIELSTCFFLCLLRFCFSATRRYYLGAVELSWDYMQGAPTSESATPESGPGSEPATSGSETPGTSESATPESGPGSEPATSGSETPGTSESATPESGPGTSTEPSEGSAPGSPAGSPTSTEEGTSESATPESGPGSEPATSGSETPGTSESATPESGPGSPAGSPTSTEEGSPAGSPTSTEEGASSSDLGELPVDARFPPRVPKSFPFNTSVVYKKTLFVEFTDHLFNIAKPRPPWMGLLGPTIQAEVYDTVVITLKNMASHPVSLHAVGVSYWKASEGAEYDDQTSQREKEDDKVFPGGSHTYVWQVLKENGPMASDPLCLTYSYLSHVDLVKDLNSGLIGALLVCREGSLAKEKTQTLHKFILLFAVFDEGKSWHSETKNSLMQDRDAASARAWPKMHTVNGYVNRSLPGLIGCHRKSVYWHVIGMGTTPEVHSIFLEGHTFLVRNHRQASLEISPITFLTAQTLLMDLGQFLLFCHISSHQHDGMEAYVKVDSCPEEPQLRMKNNEEAEDYDDDLTDSEMDVVRFDDDNSPSFIQIRSVAKKHPKTWVHYIAAEEEDWDYAPLVLAPDDRSYKSQYLNNGPQRIGRKYKKVRFMAYTDETFKTREAIQHESGILGPLLYGEVGDTLLIIFKNQASRPYNIYPHGITDVRPLYSRRLPKGVKHLKDFPILPGEIFKYKWTVTVEDGPTKSDPRCLTRYYSSFVNMERDLASGLIGPLLICYKESVDQRGNQIMSDKRNVILFSVFDENRSWYLTENIQRFLPNPAGVQLEDPEFQASNIMHSINGYVFDSLQLSVCLHEVAYWYILSIGAQTDFLSVFFSGYTFKHKMVYEDTLTLFPFSGETVFMSMENPGLWILGCHNSDFRNRGMTALLKVSSCDKNTGDYYEDSYEDISAYLLSKNNAIEPRSFSQNGAPGTSESATPESGPGSEPATSGSETPGTSESATPESGPGSEPATSGSETPGTSESATPESGPGTSTEPSEGSAPGSPAGSPTSTEEGTSESATPESGPGSEPATSGSETPGTSESATPESGPGSPAGSPTSTEEGSPAGSPTSTEEGTSTEPSEGSAPGTSESATPESGPGTSESATPESGPGTSESATPESGPGSEPATSGSETPGSEPATSGSETPGSPAGSPTSTEEGTSTEPSEGSAPGTSTEPSEGSAPGSEPATSGSETPGTSESATPESGPGTSTEPSEGSAPASSPPVLKRHQAEITRTTLQSDQEEIDYDDTISVEMKKEDFDIYDEDENQSPRSFQKKTRHYFIAAVERLWDYGMSSSPHVLRNRAQSGSVPQFKKVVFQEFTDGSFTQPLYRGELNEHLGLLGPYIRAEVEDNIMVTFRNQASRPYSFYSSLISYEEDQRQGAEPRKNFVKPNETKTYFWKVQHHMAPTKDEFDCKAWAYFSDVDLEKDVHSGLIGPLLVCHTNTLNPAHGRQVTVQEFALFFTIFDETKSWYFTENMERNCRAPCNIQMEDPTFKENYRFHAINGYIMDTLPGLVMAQDQRIRWYLLSMGSNENIHSIHFSGHVFTVRKKEEYKMALYNLYPGVFETVEMLPSKAGIWRVECLIGEHLHAGMSTLFLVYSNKCQTPLGMASGHIRDFQITASGQYGQWAPKLARLHYSGSINAWSTKEPFSWIKVDLLAPMIIHGIKTQGARQKFSSLYISQFIIMYSLDGKKWQTYRGNSTGTLMVFFGNVDSSGIKHNIFNPPIIARYIRLHPTHYSIRSTLRMELMGCDLNSCSMPLGMESKAISDAQITASSYFTNMFATWSPSKARLHLQGRSNAWRPQVNNPKEWLQVDFQKTMKVTGVTTQGVKSLLTSMYVKEFLISSSQDGHQWTLFFQNGKVKVFQGNQDSFTPVVNSLDPPLLTRYLRIHPQSWVHQIALRMEVLGCEAQDLY

SEQ ID NO: 86 - protein, 1515 aa, Artificial Sequence
  VWF031
MIPARFAGVLLALALILPGTLCAEGTRGRSSTARCSLFGSDFVNTFDGSMYSFAGYCSYLLAGGCQKRSFSIIGDFQNGKRVSLSVYLGEFFDIHLFVNGTVTQGDQRVSMPYASKGLYLETEAGYYKLSGEAYGFVARIDGSGNFQVLLSDRYFNKTCGLCGNFNIFAEDDFMTQEGTLTSDPYDFANSWALSSGEQWCERASPPSSSCNISSGEMQKGLWEQCQLLKSTSVFARCHPLVDPEPFVALCEKTLCECAGGLECACPALLEYARTCAQEGMVLYGWTDHSACSPVCPAGMEYRQCVSPCARTCQSLHINEMCQERCVDGCSCPEGQLLDEGLCVESTECPCVHSGKRYPPGTSLSRDCNTCICRNSQWICSNEECPGECLVTGQSHFKSFDNRYFTFSGICQYLLARDCQDHSFSIVIETVQCADDRDAVCTRSVTVRLPGLHNSLVKLKHGAGVAMDGQDIQLPLLKGDLRIQHTVTASVRLSYGEDLQMDWDGRGRLLVKLSPVYAGKTCGLCGNYNGNQGDDFLTPSGLAEPRVEDFGNAWKLHGDCQDLQKQHSDPCALNPRMTRFSEEACAVLTSPTFEACHRAVSPLPYLRNCRYDVCSCSDGRECLCGALASYAAACAGRGVRVAWREPGRCELNCPKGQVYLQCGTPCNLTCRSLSYPDEECNEACLEGCFCPPGLYMDERGDCVPKAQCPCYYDGEIFQPEDIFSDHHTMCYCEDGFMHCTMSGVPGSLLPDAVLSSPLSHRSKRSLSCRPPMVKLVCPADNLRAEGLECTKTCQNYDLECMSMGCVSGCLCPPGMVRHENRCVALERCPCFHQGKEYAPGETVKIGCNTCVCRDRKWNCTDHVCDATCSTIGMAHYLTFDGLKYLFPGECQYVLVQDYCGSNPGTFRILVGNKGCSHPSVKCKKRVTILVEGGEIELFDGEVNVKRPMKDETHFEVVESGRYIILLLGKALSVVWDRHLSISVVLKQTYQEKVCGLCGNFDGIQNNDLTSSNLQVEEDPVDFGNSWKVSSQCADTRKVPLDSSPATCHNNIMKQTMVDSSCRILTSDVFQDCNKLVDPEPYLDVCIYDTCSCESIGDCAAFCDTIAAYAHVCAQHGKVVTWRTATLCPQSCEERNLRENGYEAEWRYNSCAPACQVTCQHPEPLACPVQCVEGCHAHCPPGKILDELLQTCVDPEDCPVCEVAGRRFASGKKVTLNPSDPEHCQICHCDVVNLTCEACQEPISGGGGSGGGGSGGGGSGGGGSGGGGSGGGGSLVPRGSGGGGSGGGGSDKTHTCPPCPAPELLGGPSVFLFPPKPKDTLMISRTPEVTCVVVDVSHEDPEVKFNWYVDGVEVHNAKTKPREEQYNSTYRVVSVLTVLHQDWLNGKEYKCKVSNKALPAPIEKTISKAKGQPREPQVYTLPPSRDELTKNQVSLTCLVKGFYPSDIAVEWESNGQPENNYKTTPPVLDSDGSFFLYSKLTVDKSRWQQGNVFSCSVMHEALHNHYTQKSLSLSPGK

SEQ ID NO: 87 - protein, 1778 aa, Artificial Sequence
  VWF034
MIPARFAGVLLALALILPGTLCAEGTRGRSSTARCSLFGSDFVNTFDGSMYSFAGYCSYLLAGGCQKRSFSIIGDFQNGKRVSLSVYLGEFFDIHLFVNGTVTQGDQRVSMPYASKGLYLETEAGYYKLSGEAYGFVARIDGSGNFQVLLSDRYFNKTCGLCGNFNIFAEDDFMTQEGTLTSDPYDFANSWALSSGEQWCERASPPSSSCNISSGEMQKGLWEQCQLLKSTSVFARCHPLVDPEPFVALCEKTLCECAGGLECACPALLEYARTCAQEGMVLYGWTDHSACSPVCPAGMEYRQCVSPCARTCQSLHINEMCQERCVDGCSCPEGQLLDEGLCVESTECPCVHSGKRYPPGTSLSRDCNTCICRNSQWICSNEECPGECLVTGQSHFKSFDNRYFTFSGICQYLLARDCQDHSFSIVIETVQCADDRDAVCTRSVTVRLPGLHNSLVKLKHGAGVAMDGQDIQLPLLKGDLRIQHTVTASVRLSYGEDLQMDWDGRGRLLVKLSPVYAGKTCGLCGNYNGNQGDDFLTPSGLAEPRVEDFGNAWKLHGDCQDLQKQHSDPCALNPRMTRFSEEACAVLTSPTFEACHRAVSPLPYLRNCRYDVCSCSDGRECLCGALASYAAACAGRGVRVAWREPGRCELNCPKGQVYLQCGTPCNLTCRSLSYPDEECNEACLEGCFCPPGLYMDERGDCVPKAQCPCYYDGEIFQPEDIFSDHHTMCYCEDGFMHCTMSGVPGSLLPDAVLSSPLSHRSKRSLSCRPPMVKLVCPADNLRAEGLECTKTCQNYDLECMSMGCVSGCLCPPGMVRHENRCVALERCPCFHQGKEYAPGETVKIGCNTCVCRDRKWNCTDHVCDATCSTIGMAHYLTFDGLKYLFPGECQYVLVQDYCGSNPGTFRILVGNKGCSHPSVKCKKRVTILVEGGEIELFDGEVNVKRPMKDETHFEVVESGRYIILLLGKALSVVWDRHLSISVVLKQTYQEKVCGLCGNFDGIQNNDLTSSNLQVEEDPVDFGNSWKVSSQCADTRKVPLDSSPATCHNNIMKQTMVDSSCRILTSDVFQDCNKLVDPEPYLDVCIYDTCSCESIGDCAAFCDTIAAYAHVCAQHGKVVTWRTATLCPQSCEERNLRENGYEAEWRYNSCAPACQVTCQHPEPLACPVQCVEGCHAHCPPGKILDELLQTCVDPEDCPVCEVAGRRFASGKKVTLNPSDPEHCQICHCDVVNLTCEACQEPISGTSESATPESGPGSEPATSGSETPGTSESATPESGPGSEPATSGSETPGTSESATPESGPGTSTEPSEGSAPGSPAGSPTSTEEGTSESATPESGPGSEPATSGSETPGTSESATPESGPGSPAGSPTSTEEGSPAGSPTSTEEGTSTEPSEGSAPGTSESATPESGPGTSESATPESGPGTSESATPESGPGSEPATSGSETPGSEPATSGSETPGSPAGSPTSTEEGTSTEPSEGSAPGTSTEPSEGSAPGSEPATSGSETPGTSESATPESGPGTSTEPSEGSAPDIGGGGGSGGGGSLVPRGSGGDKTHTCPPCPAPELLGGPSVFLFPPKPKDTLMISRTPEVTCVVVDVSHEDPEVKFNWYVDGVEVHNAKTKPREEQYNSTYRVVSVLTVLHQDWLNGKEYKCKVSNKALPAPIEKTISKAKGQPREPQVYTLPPSRDELTKNQVSLTCLVKGFYPSDIAVEWESNGQPENNYKTTPPVLDSDGSFFLYSKLTVDKSRWQQGNVFSCSVMHEALHNHYTQKSLSLSPGK

SEQ ID NO: 88 - protein, 32 aa, Artificial Sequence
  Cleavable linker
DKNTGDYYEDSYEDISAYLLSKNNAIEPRSFS

SEQ ID NO: 89 - protein, 11 aa, Artificial Sequence
  Ig constant region portion
PKNSSMISNTP

SEQ ID NO: 90 - protein, 7 aa, Artificial Sequence
  Ig constant region portion
HQSLGTQ

SEQ ID NO: 91 - protein, 8 aa, Artificial Sequence
  Ig constant region portion
HQNLSDGK

SEQ ID NO: 92 - protein, 8 aa, Artificial Sequence
  Ig constant region portion
HQNISDGK

SEQ ID NO: 93 - protein, 8 aa, Artificial Sequence
  Ig constant region portion
VISSHLGQ

SEQ ID NO: 94 - protein, 5 aa, Artificial Sequence
  Linker, where the sequence can repeated between 1-20 times
GGGGS

SEQ ID NO: 95 - protein, 8 aa, Artificial Sequence
  Linker, where the sequence can be repeated between 1-100 times or 1-20 times
GGSGGGGS

SEQ ID NO: 96 - protein, 7 aa, Artificial Sequence
  Linker
SGGSGGS

SEQ ID NO: 97 - protein, 15 aa, Artificial Sequence
  Linker
GGSGGSGGSGGSGGG

SEQ ID NO: 98 - protein, 16 aa, Artificial Sequence
  Linker
GGSGGSGGGGSGGGGS

SEQ ID NO: 99 - protein, 18 aa, Artificial Sequence
  Linker
GGSGGSGGSGGSGGSGGS

SEQ ID NO: 100 - protein, 15 aa, Artificial Sequence
  Linker
GGGGSGGGGSGGGGS

SEQ ID NO: 101 - protein, 4 aa, Artificial Sequence
  Linker, where the sequence can be repeated between 1-00 times or 1-20 times
GGGS

SEQ ID NO: 102 - protein, 4 aa, Artificial Sequence
  Cleavage site
RRRR

SEQ ID NO: 103 - protein, 6 aa, Artificial Sequence
  Cleavage site
RKRRKR

SEQ ID NO: 104 - protein, 5 aa, Artificial Sequence
  Cleavage site
RRRRS

SEQ ID NO: 105 - protein, 4 aa, Artificial Sequence
  Thrombin cleavable site
  misc_feature (1)..(1): Xaa is an aliphatic amino acid
XVPR

SEQ ID NO: 106 - protein, 34 aa, Artificial Sequence
  Cleavable linker
ISDKNTGDYYEDSYEDISAYLLSKNNAIEPRSFS

SEQ ID NO: 107 - protein, 40 aa, Artificial Sequence
  Cleavable linker
ISMKNNEEAEDYDDDLTDSEMDVVRFDDDNSPSFIQIRSV

SEQ ID NO: 108 - protein, 46 aa, Artificial Sequence
  Cleavable linker
ISEITRTTLQSDQEEIDYDDTISVEMKKEDFDIYDEDENQSPRSFQ

SEQ ID NO: 109 - protein, 6 aa, Artificial Sequence
  PAR1 exosite interaction motif
SFLLRN

SEQ ID NO: 110 - protein, 4 aa, Artificial Sequence
  PAR1 exosite interaction motif
PNDK

SEQ ID NO: 111 - protein, 5 aa, Artificial Sequence
  PAR1 exosite interaction motif
PNDKY

SEQ ID NO: 112 - protein, 6 aa, Artificial Sequence
  PAR1 exosite interaction motif
PNDKYE

SEQ ID NO: 113 - protein, 7 aa, Artificial Sequence
  PAR1 exosite interaction motif
PNDKYEP

SEQ ID NO: 114 - protein, 8 aa, Artificial Sequence
  PAR1 exosite interaction motif
PNDKYEPF

SEQ ID NO: 115 - protein, 9 aa, Artificial Sequence
  PAR1 exosite interaction motif
PNDKYEPFW

SEQ ID NO: 116 - protein, 10 aa, Artificial Sequence
  PAR1 exosite interaction motif
PNDKYEPFWE

SEQ ID NO: 117 - protein, 11 aa, Artificial Sequence
  PAR1 exosite interaction motif
PNDKYEPFWED

SEQ ID NO: 118 - protein, 12 aa, Artificial Sequence
  PAR1 exosite interaction motif
PNDKYEPFWEDE

SEQ ID NO: 119 - protein, 13 aa, Artificial Sequence
  PAR1 exosite interaction motif
PNDKYEPFWEDEE

SEQ ID NO: 120 - protein, 14 aa, Artificial Sequence
  PAR1 exosite interaction motif
PNDKYEPFWEDEES

SEQ ID NO: 121 - protein, 7 aa, Artificial Sequence
  FXIa cleavage site
KLTRAET

SEQ ID NO: 122 - protein, 7 aa, Artificial Sequence
  FXIa cleavage site
DFTRVVG

SEQ ID NO: 123 - protein, 8 aa, Artificial Sequence
  FXIIa cleavage site
TMTRIVGG

SEQ ID NO: 124 - protein, 8 aa, Artificial Sequence
  Kallikrein cleavage site
SPFRSTGG

SEQ ID NO: 125 - protein, 8 aa, Artificial Sequence
  FVIIa cleavage site
LQVRIVGG

SEQ ID NO: 126 - protein, 8 aa, Artificial Sequence
  FIXa cleavage site
PLGRIVGG

SEQ ID NO: 127 - protein, 8 aa, Artificial Sequence
  FXa cleavage site
IEGRTVGG

SEQ ID NO: 128 - protein, 8 aa, Artificial Sequence
  FIIa (thrombin) cleavage site
LTPRSLLV

SEQ ID NO: 129 - protein, 8 aa, Artificial Sequence
  Elastase-2 cleavage site
LGPVSGVP

SEQ ID NO: 130 - protein, 8 aa, Artificial Sequence
  Granzyme-B cleavage
VAGDSLEE

SEQ ID NO: 131 - protein, 8 aa, Artificial Sequence
  MMP-12 cleavage site
GPAGLGGA

SEQ ID NO: 132 - protein, 8 aa, Artificial Sequence
  MMP-13 cleavage site
GPAGLRGA

SEQ ID NO: 133 - protein, 8 aa, Artificial Sequence
  MMP-17 cleavage site
APLGLRLR

SEQ ID NO: 134 - protein, 8 aa, Artificial Sequence
  MMP-20 cleavage site
PALPLVAQ

SEQ ID NO: 135 - protein, 7 aa, Artificial Sequence
  TEV cleavage site
ENLYFQG

SEQ ID NO: 136 - protein, 8 aa, Artificial Sequence
  Enterokinase cleavage site
DDDKIVGG

SEQ ID NO: 137 - protein, 8 aa, Artificial Sequence
  Protease 3C (PRESCISSION) cleavage site
LEVLFQGP

SEQ ID NO: 138 - protein, 8 aa, Artificial Sequence
  Sortase A cleavage site
LPKTGSES

SEQ ID NO: 139 - protein, 31 aa, Artificial Sequence
  Cleavable linker
KNTGDYYEDSYEDISAYLLSKNNAIEPRSFS

SEQ ID NO: 140 - protein, 30 aa, Artificial Sequence
  Cleavable linker
NTGDYYEDSYEDISAYLLSKNNAIEPRSFS

SEQ ID NO: 141 - protein, 29 aa, Artificial Sequence
  Cleavable linker
TGDYYEDSYEDISAYLLSKNNAIEPRSFS

SEQ ID NO: 142 - protein, 28 aa, Artificial Sequence
  Cleavable linker
GDYYEDSYEDISAYLLSKNNAIEPRSFS

SEQ ID NO: 143 - protein, 27 aa, Artificial Sequence
  Cleavable linker
DYYEDSYEDISAYLLSKNNAIEPRSFS

SEQ ID NO: 144 - protein, 26 aa, Artificial Sequence
  Cleavable linker
YYEDSYEDISAYLLSKNNAIEPRSFS

SEQ ID NO: 145 - protein, 10 aa, Artificial Sequence
  Thrombin cleavage site
ALRPRVVGGA

SEQ ID NO: 146 - protein, 25 aa, Artificial Sequence
  Linker
TLDPRSFLLRNPNDKYEPFWEDEEK

SEQ ID NO: 147 - DNA, 4548 bp, Artificial Sequence
  VWF031
atgattcctgccagatttgccggggtgctgcttgctctggccctcattttgccagggaccctttgtgcagaaggaactcgcggcaggtcatccacggcccgatgcagccttttcggaagtgacttcgtcaacacctttgatgggagcatgtacagctttgcgggatactgcagttacctcctggcagggggctgccagaaacgctccttctcgattattggggacttccagaatggcaagagagtgagcctctccgtgtatcttggggaattttttgacatccatttgtttgtcaatggtaccgtgacacagggggaccaaagagtctccatgccctatgcctccaaagggctgtatctagaaactgaggctgggtactacaagctgtccggtgaggcctatggctttgtggccaggatcgatggcagcggcaactttcaagtcctgctgtcagacagatacttcaacaagacctgcgggctgtgtggcaactttaacatctttgctgaagatgactttatgacccaagaagggaccttgacctcggacccttatgactttgccaactcatgggctctgagcagtggagaacagtggtgtgaacgggcatctcctcccagcagctcatgcaacatctcctctggggaaatgcagaagggcctgtgggagcagtgccagcttctgaagagcacctcggtgtttgcccgctgccaccctctggtggaccccgagccttttgtggccctgtgtgagaagactttgtgtgagtgtgctggggggctggagtgcgcctgccctgccctcctggagtacgcccggacctgtgcccaggagggaatggtgctgtacggctggaccgaccacagcgcgtgcagcccagtgtgccctgctggtatggagtataggcagtgtgtgtccccttgcgccaggacctgccagagcctgcacatcaatgaaatgtgtcaggagcgatgcgtggatggctgcagctgccctgagggacagctcctggatgaaggcctctgcgtggagagcaccgagtgtccctgcgtgcattccggaaagcgctaccctcccggcacctccctctctcgagactgcaacacctgcatttgccgaaacagccagtggatctgcagcaatgaagaatgtccaggggagtgccttgtcactggtcaatcccacttcaagagctttgacaacagatacttcaccttcagtgggatctgccagtacctgctggcccgggattgccaggaccactccttctccattgtcattgagactgtccagtgtgctgatgaccgcgacgctgtgtgcacccgctccgtcaccgtccggctgcctggcctgcacaacagccttgtgaaactgaagcatggggcaggagttgccatggatggccaggacatccagctccccctcctgaaaggtgacctccgcatccagcatacagtgacggcctccgtgcgcctcagctacggggaggacctgcagatggactgggatggccgcgggaggctgctggtgaagctgtcccccgtctatgccgggaagacctgcggcctgtgtgggaattacaatggcaaccagggcgacgacttccttaccccctctgggctggcggagccccgggtggaggacttcgggaacgcctggaagctgcacggggactgccaggacctgcagaagcagcacagcgatccctgcgccctcaacccgcgcatgaccaggttctccgaggaggcgtgcgcggtcctgacgtcccccacattcgaggcctgccatcgtgccgtcagcccgctgccctacctgcggaactgccgctacgacgtgtgctcctgctcggacggccgcgagtgcctgtgcggcgccctggccagctatgccgcggcctgcgcggggagaggcgtgcgcgtcgcgtggcgcgagccaggccgctgtgagctgaactgcccgaaaggccaggtgtacctgcagtgcgggaccccctgcaacctgacctgccgctctctctcttacccggatgaggaatgcaatgaggcctgcctggagggctgcttctgccccccagggctctacatggatgagaggggggactgcgtgcccaaggcccagtgcccctgttactatgacggtgagatcttccagccagaagacatcttctcagaccatcacaccatgtgctactgtgaggatggcttcatgcactgtaccatgagtggagtccccggaagcttgctgcctgacgctgtcctcagcagtcccctgtctcatcgcagcaaaaggagcctatcctgtcggccccccatggtcaagctggtgtgtcccgctgacaacctgcgggctgaagggctcgagtgtaccaaaacgtgccagaactatgacctggagtgcatgagcatgggctgtgtctctggctgcctctgccccccgggcatggtccggcatgagaacagatgtgtggccctggaaaggtgtccctgcttccatcagggcaaggagtatgcccctggagaaacagtgaagattggctgcaacacttgtgtctgtcgggaccggaagtggaactgcacagaccatgtgtgtgatgccacgtgctccacgatcggcatggcccactacctcaccttcgacgggctcaaatacctgttccccggggagtgccagtacgttctggtgcaggattactgcggcagtaaccctgggacctttcggatcctagtggggaataagggatgcagccacccctcagtgaaatgcaagaaacgggtcaccatcctggtggagggaggagagattgagctgtttgacggggaggtgaatgtgaagaggcccatgaaggatgagactcactttgaggtggtggagtctggccggtacatcattctgctgctgggcaaagccctctccgtggtctgggaccgccacctgagcatctccgtggtcctgaagcagacataccaggagaaagtgtgtggcctgtgtgggaattttgatggcatccagaacaatgacctcaccagcagcaacctccaagtggaggaagaccctgtggactttgggaactcctggaaagtgagctcgcagtgtgctgacaccagaaaagtgcctctggactcatcccctgccacctgccataacaacatcatgaagcagacgatggtggattcctcctgtagaatccttaccagtgacgtcttccaggactgcaacaagctggtggaccccgagccatatctggatgtctgcatttacgacacctgctcctgtgagtccattggggactgcgccgcattctgcgacaccattgctgcctatgcccacgtgtgtgcccagcatggcaaggtggtgacctggaggacggccacattgtgcccccagagctgcgaggagaggaatctccgggagaacgggtatgaggctgagtggcgctataacagctgtgcacctgcctgtcaagtcacgtgtcagcaccctgagccactggcctgccctgtgcagtgtgtggagggctgccatgcccactgccctccagggaaaatcctggatgagcttttgcagacctgcgttgaccctgaagactgtccagtgtgtgaggtggctggccggcgttttgcctcaggaaagaaagtcaccttgaatcccagtgaccctgagcactgccagatttgccactgtgatgttgtcaacctcacctgtgaagcctgccaggagccgatatctggcggtggaggttccggtggcgggggatccggcggtggaggttccggcggtggaggttccggtggcgggggatccggtggcgggggatccctggtcccccggggcagcggcggtggaggttccggtggcgggggatccgacaaaactcacacatgcccaccgtgcccagctccagaactcctgggcggaccgtcagtcttcctcttccccccaaaacccaaggacaccctcatgatctcccggacccctgaggtcacatgcgtggtggtggacgtgagccacgaagaccctgaggtcaagttcaactggtacgtggacggcgtggaggtgcataatgccaagacaaagccgcgggaggagcagtacaacagcacgtaccgtgtggtcagcgtcctcaccgtcctgcaccaggactggctgaatggcaaggagtacaagtgcaaggtctccaacaaagccctcccagcccccatcgagaaaaccatctccaaagccaaagggcagccccgagaaccacaggtgtacaccctgcccccatcccgcgatgagctgaccaagaaccaggtcagcctgacctgcctggtcaaaggcttctatcccagcgacatcgccgtggagtgggagagcaatgggcagccggagaacaactacaagaccacgcctcccgtgttggactccgacggctccttcttcctctacagcaagctcaccgtggacaagagcaggtggcagcaggggaacgtcttctcatgctccgtgatgcatgaggctctgcacaaccactacacgcagaagagcctctccctgtctccgggtaaatga

SEQ ID NO: 148 - DNA, 5379 bp, Artificial Sequence
  VWF034
atgattcctgccagatttgccggggtgctgcttgctctggccctcattttgccagggaccctttgtgcagaaggaactcgcggcaggtcatccacggcccgatgcagccttttcggaagtgacttcgtcaacacctttgatgggagcatgtacagctttgcgggatactgcagttacctcctggcagggggctgccagaaacgctccttctcgattattggggacttccagaatggcaagagagtgagcctctccgtgtatcttggggaattttttgacatccatttgtttgtcaatggtaccgtgacacagggggaccaaagagtctccatgccctatgcctccaaagggctgtatctagaaactgaggctgggtactacaagctgtccggtgaggcctatggctttgtggccaggatcgatggcagcggcaactttcaagtcctgctgtcagacagatacttcaacaagacctgcgggctgtgtggcaactttaacatctttgctgaagatgactttatgacccaagaagggaccttgacctcggacccttatgactttgccaactcatgggctctgagcagtggagaacagtggtgtgaacgggcatctcctcccagcagctcatgcaacatctcctctggggaaatgcagaagggcctgtgggagcagtgccagcttctgaagagcacctcggtgtttgcccgctgccaccctctggtggaccccgagccttttgtggccctgtgtgagaagactttgtgtgagtgtgctggggggctggagtgcgcctgccctgccctcctggagtacgcccggacctgtgcccaggagggaatggtgctgtacggctggaccgaccacagcgcgtgcagcccagtgtgccctgctggtatggagtataggcagtgtgtgtccccttgcgccaggacctgccagagcctgcacatcaatgaaatgtgtcaggagcgatgcgtggatggctgcagctgccctgagggacagctcctggatgaaggcctctgcgtggagagcaccgagtgtccctgcgtgcattccggaaagcgctaccctcccggcacctccctctctcgagactgcaacacctgcatttgccgaaacagccagtggatctgcagcaatgaagaatgtccaggggagtgccttgtcactggtcaatcccacttcaagagctttgacaacagatacttcaccttcagtgggatctgccagtacctgctggcccgggattgccaggaccactccttctccattgtcattgagactgtccagtgtgctgatgaccgcgacgctgtgtgcacccgctccgtcaccgtccggctgcctggcctgcacaacagccttgtgaaactgaagcatggggcaggagttgccatggatggccaggacatccagctccccctcctgaaaggtgacctccgcatccagcatacagtgacggcctccgtgcgcctcagctacggggaggacctgcagatggactgggatggccgcgggaggctgctggtgaagctgtcccccgtctatgccgggaagacctgcggcctgtgtgggaattacaatggcaaccagggcgacgacttccttaccccctctgggctggcggagccccgggtggaggacttcgggaacgcctggaagctgcacggggactgccaggacctgcagaagcagcacagcgatccctgcgccctcaacccgcgcatgaccaggttctccgaggaggcgtgcgcggtcctgacgtcccccacattcgaggcctgccatcgtgccgtcagcccgctgccctacctgcggaactgccgctacgacgtgtgctcctgctcggacggccgcgagtgcctgtgcggcgccctggccagctatgccgcggcctgcgcggggagaggcgtgcgcgtcgcgtggcgcgagccaggccgctgtgagctgaactgcccgaaaggccaggtgtacctgcagtgcgggaccccctgcaacctgacctgccgctctctctcttacccggatgaggaatgcaatgaggcctgcctggagggctgcttctgccccccagggctctacatggatgagaggggggactgcgtgcccaaggcccagtgcccctgttactatgacggtgagatcttccagccagaagacatcttctcagaccatcacaccatgtgctactgtgaggatggcttcatgcactgtaccatgagtggagtccccggaagcttgctgcctgacgctgtcctcagcagtcccctgtctcatcgcagcaaaaggagcctatcctgtcggccccccatggtcaagctggtgtgtcccgctgacaacctgcgggctgaagggctcgagtgtaccaaaacgtgccagaactatgacctggagtgcatgagcatgggctgtgtctctggctgcctctgccccccgggcatggtccggcatgagaacagatgtgtggccctggaaaggtgtccctgcttccatcagggcaaggagtatgcccctggagaaacagtgaagattggctgcaacacttgtgtctgtcgggaccggaagtggaactgcacagaccatgtgtgtgatgccacgtgctccacgatcggcatggcccactacctcaccttcgacgggctcaaatacctgttccccggggagtgccagtacgttctggtgcaggattactgcggcagtaaccctgggacctttcggatcctagtggggaataagggatgcagccacccctcagtgaaatgcaagaaacgggtcaccatcctggtggagggaggagagattgagctgtttgacggggaggtgaatgtgaagaggcccatgaaggatgagactcactttgaggtggtggagtctggccggtacatcattctgctgctgggcaaagccctctccgtggtctgggaccgccacctgagcatctccgtggtcctgaagcagacataccaggagaaagtgtgtggcctgtgtgggaattttgatggcatccagaacaatgacctcaccagcagcaacctccaagtggaggaagaccctgtggactttgggaactcctggaaagtgagctcgcagtgtgctgacaccagaaaagtgcctctggactcatcccctgccacctgccataacaacatcatgaagcagacgatggtggattcctcctgtagaatccttaccagtgacgtcttccaggactgcaacaagctggtggaccccgagccatatctggatgtctgcatttacgacacctgctcctgtgagtccattggggactgcgccgcattctgcgacaccattgctgcctatgcccacgtgtgtgcccagcatggcaaggtggtgacctggaggacggccacattgtgcccccagagctgcgaggagaggaatctccgggagaacgggtatgaggctgagtggcgctataacagctgtgcacctgcctgtcaagtcacgtgtcagcaccctgagccactggcctgccctgtgcagtgtgtggagggctgccatgcccactgccctccagggaaaatcctggatgagcttttgcagacctgcgttgaccctgaagactgtccagtgtgtgaggtggctggccggcgttttgcctcaggaaagaaagtcaccttgaatcccagtgaccctgagcactgccagatttgccactgtgatgttgtcaacctcacctgtgaagcctgccaggagccgatatcgggtacctcagagtctgctacccccgagtcagggccaggatcagagccagccacctccgggtctgagacacccgggacttccgagagtgccacccctgagtccggacccgggtccgagcccgccacttccggctccgaaactcccggcacaagcgagagcgctaccccagagtcaggaccaggaacatctacagagccctctgaaggctccgctccagggtccccagccggcagtcccactagcaccgaggagggaacctctgaaagcgccacacccgaatcagggccagggtctgagcctgctaccagcggcagcgagacaccaggcacctctgagtccgccacaccagagtccggacccggatctcccgctgggagccccacctccactgaggagggatctcctgctggctctccaacatctactgaggaaggtacctcaaccgagccatccgagggatcagctcccggcacctcagagtcggcaaccccggagtctggacccggaacttccgaaagtgccacaccagagtccggtcccgggacttcagaatcagcaacacccgagtccggccctgggtctgaacccgccacaagtggtagtgagacaccaggatcagaacctgctacctcagggtcagagacacccggatctccggcaggctcaccaacctccactgaggagggcaccagcacagaaccaagcgagggctccgcacccggaacaagcactgaacccagtgagggttcagcacccggctctgagccggccacaagtggcagtgagacacccggcacttcagagagtgccacccccgagagtggcccaggcactagtaccgagccctctgaaggcagtgcgccagattctggcggtggaggttccggtggcgggggatccggtggcgggggatccggtggcgggggatccggtggcgggggatccctggtcccccggggcagcggaggcgacaaaactcacacatgcccaccgtgcccagctccagaactcctgggcggaccgtcagtcttcctcttccccccaaaacccaaggacaccctcatgatctcccggacccctgaggtcacatgcgtggtggtggacgtgagccacgaagaccctgaggtcaagttcaactggtacgtggacggcgtggaggtgcataatgccaagacaaagccgcgggaggagcagtacaacagcacgtaccgtgtggtcagcgtcctcaccgtcctgcaccaggactggctgaatggcaaggagtacaagtgcaaggtctccaacaaagccctcccagcccccatcgagaaaaccatctccaaagccaaagggcagccccgagaaccacaggtgtacaccctgcccccatcccgggatgagctgaccaagaaccaggtcagcctgacctgcctggtcaaaggcttctatcccagcgacatcgccgtggagtgggagagcaatgggcagccggagaacaactacaagaccacgcctcccgtgttggactccgacggctccttcttcctctacagcaagctcaccgtggacaagagcaggtggcagcaggggaacgtcttctcatgctccgtgatgcatgaggctctgcacaaccactacacgcagaagagcctctccctgtctccgggtaaatga

SEQ ID NO: 149 - DNA, 4548 bp, Artificial Sequence
  VWF050 (IHH triple mutant)
atgattcctgccagatttgccggggtgctgcttgctctggccctcattttgccagggaccctttgtgcagaaggaactcgcggcaggtcatccacggcccgatgcagccttttcggaagtgacttcgtcaacacctttgatgggagcatgtacagctttgcgggatactgcagttacctcctggcagggggctgccagaaacgctccttctcgattattggggacttccagaatggcaagagagtgagcctctccgtgtatcttggggaattttttgacatccatttgtttgtcaatggtaccgtgacacagggggaccaaagagtctccatgccctatgcctccaaagggctgtatctagaaactgaggctgggtactacaagctgtccggtgaggcctatggctttgtggccaggatcgatggcagcggcaactttcaagtcctgctgtcagacagatacttcaacaagacctgcgggctgtgtggcaactttaacatctttgctgaagatgactttatgacccaagaagggaccttgacctcggacccttatgactttgccaactcatgggctctgagcagtggagaacagtggtgtgaacgggcatctcctcccagcagctcatgcaacatctcctctggggaaatgcagaagggcctgtgggagcagtgccagcttctgaagagcacctcggtgtttgcccgctgccaccctctggtggaccccgagccttttgtggccctgtgtgagaagactttgtgtgagtgtgctggggggctggagtgcgcctgccctgccctcctggagtacgcccggacctgtgcccaggagggaatggtgctgtacggctggaccgaccacagcgcgtgcagcccagtgtgccctgctggtatggagtataggcagtgtgtgtccccttgcgccaggacctgccagagcctgcacatcaatgaaatgtgtcaggagcgatgcgtggatggctgcagctgccctgagggacagctcctggatgaaggcctctgcgtggagagcaccgagtgtccctgcgtgcattccggaaagcgctaccctcccggcacctccctctctcgagactgcaacacctgcatttgccgaaacagccagtggatctgcagcaatgaagaatgtccaggggagtgccttgtcactggtcaatcccacttcaagagctttgacaacagatacttcaccttcagtgggatctgccagtacctgctggcccgggattgccaggaccactccttctccattgtcattgagactgtccagtgtgctgatgaccgcgacgctgtgtgcacccgctccgtcaccgtccggctgcctggcctgcacaacagccttgtgaaactgaagcatggggcaggagttgccatggatggccaggacatccagctccccctcctgaaaggtgacctccgcatccagcatacagtgacggcctccgtgcgcctcagctacggggaggacctgcagatggactgggatggccgcgggaggctgctggtgaagctgtcccccgtctatgccgggaagacctgcggcctgtgtgggaattacaatggcaaccagggcgacgacttccttaccccctctgggctggcggagccccgggtggaggacttcgggaacgcctggaagctgcacggggactgccaggacctgcagaagcagcacagcgatccctgcgccctcaacccgcgcatgaccaggttctccgaggaggcgtgcgcggtcctgacgtcccccacattcgaggcctgccatcgtgccgtcagcccgctgccctacctgcggaactgccgctacgacgtgtgctcctgctcggacggccgcgagtgcctgtgcggcgccctggccagctatgccgcggcctgcgcggggagaggcgtgcgcgtcgcgtggcgcgagccaggccgctgtgagctgaactgcccgaaaggccaggtgtacctgcagtgcgggaccccctgcaacctgacctgccgctctctctcttacccggatgaggaatgcaatgaggcctgcctggagggctgcttctgccccccagggctctacatggatgagaggggggactgcgtgcccaaggcccagtgcccctgttactatgacggtgagatcttccagccagaagacatcttctcagaccatcacaccatgtgctactgtgaggatggcttcatgcactgtaccatgagtggagtccccggaagcttgctgcctgacgctgtcctcagcagtcccctgtctcatcgcagcaaaaggagcctatcctgtcggccccccatggtcaagctggtgtgtcccgctgacaacctgcgggctgaagggctcgagtgtaccaaaacgtgccagaactatgacctggagtgcatgagcatgggctgtgtctctggctgcctctgccccccgggcatggtccggcatgagaacagatgtgtggccctggaaaggtgtccctgcttccatcagggcaaggagtatgcccctggagaaacagtgaagattggctgcaacacttgtgtctgtcgggaccggaagtggaactgcacagaccatgtgtgtgatgccacgtgctccacgatcggcatggcccactacctcaccttcgacgggctcaaatacctgttccccggggagtgccagtacgttctggtgcaggattactgcggcagtaaccctgggacctttcggatcctagtggggaataagggatgcagccacccctcagtgaaatgcaagaaacgggtcaccatcctggtggagggaggagagattgagctgtttgacggggaggtgaatgtgaagaggcccatgaaggatgagactcactttgaggtggtggagtctggccggtacatcattctgctgctgggcaaagccctctccgtggtctgggaccgccacctgagcatctccgtggtcctgaagcagacataccaggagaaagtgtgtggcctgtgtgggaattttgatggcatccagaacaatgacctcaccagcagcaacctccaagtggaggaagaccctgtggactttgggaactcctggaaagtgagctcgcagtgtgctgacaccagaaaagtgcctctggactcatcccctgccacctgccataacaacatcatgaagcagacgatggtggattcctcctgtagaatccttaccagtgacgtcttccaggactgcaacaagctggtggaccccgagccatatctggatgtctgcatttacgacacctgctcctgtgagtccattggggactgcgccgcattctgcgacaccattgctgcctatgcccacgtgtgtgcccagcatggcaaggtggtgacctggaggacggccacattgtgcccccagagctgcgaggagaggaatctccgggagaacgggtatgaggctgagtggcgctataacagctgtgcacctgcctgtcaagtcacgtgtcagcaccctgagccactggcctgccctgtgcagtgtgtggagggctgccatgcccactgccctccagggaaaatcctggatgagcttttgcagacctgcgttgaccctgaagactgtccagtgtgtgaggtggctggccggcgttttgcctcaggaaagaaagtcaccttgaatcccagtgaccctgagcactgccagatttgccactgtgatgttgtcaacctcacctgtgaagcctgccaggagccgatatctggcggtggaggttccggtggcgggggatccggcggtggaggttccggcggtggaggttccggtggcgggggatccggtggcgggggatccctggtcccccggggcagcggcggtggaggttccggtggcgggggatccgacaaaactcacacatgcccaccgtgcccagctccagaactcctgggcggaccgtcagtcttcctcttccccccaaaacccaaggacaccctcatggcctcccggacccctgaggtcacatgcgtggtggtggacgtgagccacgaagaccctgaggtcaagttcaactggtacgtggacggcgtggaggtgcataatgccaagacaaagccgcgggaggagcagtacaacagcacgtaccgtgtggtcagcgtcctcaccgtcctggcccaggactggctgaatggcaaggagtacaagtgcaaggtctccaacaaagccctcccagcccccatcgagaaaaccatctccaaagccaaagggcagccccgagaaccacaggtgtacaccctgcccccatcccgcgatgagctgaccaagaaccaggtcagcctgacctgcctggtcaaaggcttctatcccagcgacatcgccgtggagtgggagagcaatgggcagccggagaacaactacaagaccacgcctcccgtgttggactccgacggctccttcttcctctacagcaagctcaccgtggacaagagcaggtggcagcaggggaacgtcttctcatgctccgtgatgcatgaggctctgcacaacgcctacacgcagaagagcctctccctgtctccgggtaaatga

SEQ ID NO: 150 - protein, 1515 aa, Artificial Sequence
  VWF050 (IHH triple mutant)
MIPARFAGVLLALALILPGTLCAEGTRGRSSTARCSLFGSDFVNTFDGSMYSFAGYCSYLLAGGCQKRSFSIIGDFQNGKRVSLSVYLGEFFDIHLFVNGTVTQGDQRVSMPYASKGLYLETEAGYYKLSGEAYGFVARIDGSGNFQVLLSDRYFNKTCGLCGNFNIFAEDDFMTQEGTLTSDPYDFANSWALSSGEQWCERASPPSSSCNISSGEMQKGLWEQCQLLKSTSVFARCHPLVDPEPFVALCEKTLCECAGGLECACPALLEYARTCAQEGMVLYGWTDHSACSPVCPAGMEYRQCVSPCARTCQSLHINEMCQERCVDGCSCPEGQLLDEGLCVESTECPCVHSGKRYPPGTSLSRDCNTCICRNSQWICSNEECPGECLVTGQSHFKSFDNRYFTFSGICQYLLARDCQDHSFSIVIETVQCADDRDAVCTRSVTVRLPGLHNSLVKLKHGAGVAMDGQDIQLPLLKGDLRIQHTVTASVRLSYGEDLQMDWDGRGRLLVKLSPVYAGKTCGLCGNYNGNQGDDFLTPSGLAEPRVEDFGNAWKLHGDCQDLQKQHSDPCALNPRMTRFSEEACAVLTSPTFEACHRAVSPLPYLRNCRYDVCSCSDGRECLCGALASYAAACAGRGVRVAWREPGRCELNCPKGQVYLQCGTPCNLTCRSLSYPDEECNEACLEGCFCPPGLYMDERGDCVPKAQCPCYYDGEIFQPEDIFSDHHTMCYCEDGFMHCTMSGVPGSLLPDAVLSSPLSHRSKRSLSCRPPMVKLVCPADNLRAEGLECTKTCQNYDLECMSMGCVSGCLCPPGMVRHENRCVALERCPCFHQGKEYAPGETVKIGCNTCVCRDRKWNCTDHVCDATCSTIGMAHYLTFDGLKYLFPGECQYVLVQDYCGSNPGTFRILVGNKGCSHPSVKCKKRVTILVEGGEIELFDGEVNVKRPMKDETHFEVVESGRYIILLLGKALSVVWDRHLSISVVLKQTYQEKVCGLCGNFDGIQNNDLTSSNLQVEEDPVDFGNSWKVSSQCADTRKVPLDSSPATCHNNIMKQTMVDSSCRILTSDVFQDCNKLVDPEPYLDVCIYDTCSCESIGDCAAFCDTIAAYAHVCAQHGKVVTWRTATLCPQSCEERNLRENGYEAEWRYNSCAPACQVTCQHPEPLACPVQCVEGCHAHCPPGKILDELLQTCVDPEDCPVCEVAGRRFASGKKVTLNPSDPEHCQICHCDVVNLTCEACQEPISGGGGSGGGGSGGGGSGGGGSGGGGSGGGGSLVPRGSGGGGSGGGGSDKTHTCPPCPAPELLGGPSVFLFPPKPKDTLMASRTPEVTCVVVDVSHEDPEVKFNWYVDGVEVHNAKTKPREEQYNSTYRVVSVLTVLAQDWLNGKEYKCKVSNKALPAPIEKTISKAKGQPREPQVYTLPPSRDELTKNQVSLTCLVKGFYPSDIAVEWESNGQPENNYKTTPPVLDSDGSFFLYSKLTVDKSRWQQGNVFSCSVMHEALHNAYTQKSLSLSPGK

SEQ ID NO: 151 - DNA, 4959 bp, Artificial Sequence
  VWF057
atgattcctgccagatttgccggggtgctgcttgctctggccctcattttgccagggaccctttgtgcagaaggaactcgcggcaggtcatccacggcccgatgcagccttttcggaagtgacttcgtcaacacctttgatgggagcatgtacagctttgcgggatactgcagttacctcctggcagggggctgccagaaacgctccttctcgattattggggacttccagaatggcaagagagtgagcctctccgtgtatcttggggaattttttgacatccatttgtttgtcaatggtaccgtgacacagggggaccaaagagtctccatgccctatgcctccaaagggctgtatctagaaactgaggctgggtactacaagctgtccggtgaggcctatggctttgtggccaggatcgatggcagcggcaactttcaagtcctgctgtcagacagatacttcaacaagacctgcgggctgtgtggcaactttaacatctttgctgaagatgactttatgacccaagaagggaccttgacctcggacccttatgactttgccaactcatgggctctgagcagtggagaacagtggtgtgaacgggcatctcctcccagcagctcatgcaacatctcctctggggaaatgcagaagggcctgtgggagcagtgccagcttctgaagagcacctcggtgtttgcccgctgccaccctctggtggaccccgagccttttgtggccctgtgtgagaagactttgtgtgagtgtgctggggggctggagtgcgcctgccctgccctcctggagtacgcccggacctgtgcccaggagggaatggtgctgtacggctggaccgaccacagcgcgtgcagcccagtgtgccctgctggtatggagtataggcagtgtgtgtccccttgcgccaggacctgccagagcctgcacatcaatgaaatgtgtcaggagcgatgcgtggatggctgcagctgccctgagggacagctcctggatgaaggcctctgcgtggagagcaccgagtgtccctgcgtgcattccggaaagcgctaccctcccggcacctccctctctcgagactgcaacacctgcatttgccgaaacagccagtggatctgcagcaatgaagaatgtccaggggagtgccttgtcactggtcaatcccacttcaagagctttgacaacagatacttcaccttcagtgggatctgccagtacctgctggcccgggattgccaggaccactccttctccattgtcattgagactgtccagtgtgctgatgaccgcgacgctgtgtgcacccgctccgtcaccgtccggctgcctggcctgcacaacagccttgtgaaactgaagcatggggcaggagttgccatggatggccaggacatccagctccccctcctgaaaggtgacctccgcatccagcatacagtgacggcctccgtgcgcctcagctacggggaggacctgcagatggactgggatggccgcgggaggctgctggtgaagctgtcccccgtctatgccgggaagacctgcggcctgtgtgggaattacaatggcaaccagggcgacgacttccttaccccctctgggctggcggagccccgggtggaggacttcgggaacgcctggaagctgcacggggactgccaggacctgcagaagcagcacagcgatccctgcgccctcaacccgcgcatgaccaggttctccgaggaggcgtgcgcggtcctgacgtcccccacattcgaggcctgccatcgtgccgtcagcccgctgccctacctgcggaactgccgctacgacgtgtgctcctgctcggacggccgcgagtgcctgtgcggcgccctggccagctatgccgcggcctgcgcggggagaggcgtgcgcgtcgcgtggcgcgagccaggccgctgtgagctgaactgcccgaaaggccaggtgtacctgcagtgcgggaccccctgcaacctgacctgccgctctctctcttacccggatgaggaatgcaatgaggcctgcctggagggctgcttctgccccccagggctctacatggatgagaggggggactgcgtgcccaaggcccagtgcccctgttactatgacggtgagatcttccagccagaagacatcttctcagaccatcacaccatgtgctactgtgaggatggcttcatgcactgtaccatgagtggagtccccggaagcttgctgcctgacgctgtcctcagcagtcccctgtctcatcgcagcaaaaggagcctatcctgtcggccccccatggtcaagctggtgtgtcccgctgacaacctgcgggctgaagggctcgagtgtaccaaaacgtgccagaactatgacctggagtgcatgagcatgggctgtgtctctggctgcctctgccccccgggcatggtccggcatgagaacagatgtgtggccctggaaaggtgtccctgcttccatcagggcaaggagtatgcccctggagaaacagtgaagattggctgcaacacttgtgtctgtcgggaccggaagtggaactgcacagaccatgtgtgtgatgccacgtgctccacgatcggcatggcccactacctcaccttcgacgggctcaaatacctgttccccggggagtgccagtacgttctggtgcaggattactgcggcagtaaccctgggacctttcggatcctagtggggaataagggatgcagccacccctcagtgaaatgcaagaaacgggtcaccatcctggtggagggaggagagattgagctgtttgacggggaggtgaatgtgaagaggcccatgaaggatgagactcactttgaggtggtggagtctggccggtacatcattctgctgctgggcaaagccctctccgtggtctgggaccgccacctgagcatctccgtggtcctgaagcagacataccaggagaaagtgtgtggcctgtgtgggaattttgatggcatccagaacaatgacctcaccagcagcaacctccaagtggaggaagaccctgtggactttgggaactcctggaaagtgagctcgcagtgtgctgacaccagaaaagtgcctctggactcatcccctgccacctgccataacaacatcatgaagcagacgatggtggattcctcctgtagaatccttaccagtgacgtcttccaggactgcaacaagctggtggaccccgagccatatctggatgtctgcatttacgacacctgctcctgtgagtccattggggactgcgccgcattctgcgacaccattgctgcctatgcccacgtgtgtgcccagcatggcaaggtggtgacctggaggacggccacattgtgcccccagagctgcgaggagaggaatctccgggagaacgggtatgaggctgagtggcgctataacagctgtgcacctgcctgtcaagtcacgtgtcagcaccctgagccactggcctgccctgtgcagtgtgtggagggctgccatgcccactgccctccagggaaaatcctggatgagcttttgcagacctgcgttgaccctgaagactgtccagtgtgtgaggtggctggccggcgttttgcctcaggaaagaaagtcaccttgaatcccagtgaccctgagcactgccagatttgccactgtgatgttgtcaacctcacctgtgaagcctgccaggagccgatatcgggcgcgccaacatcagagagcgccacccctgaaagtggtcccgggagcgagccagccacatctgggtcggaaacgccaggcacaagtgagtctgcaactcccgagtccggacctggctccgagcctgccactagcggctccgagactccgggaacttccgagagcgctacaccagaaagcggacccggaaccagtaccgaacctagcgagggctctgctccgggcagcccagccggctctcctacatccacggaggagggcacttccgaatccgccaccccggagtcagggccaggatctgaacccgctacctcaggcagtgagacgccaggaacgagcgagtccgctacaccggagagtgggccagggagccctgctggatctcctacgtccactgaggaagggtcaccagcgggctcgcccaccagcactgaagaaggtgcctcgagcggcggtggaggttccggtggcgggggatccggtggcgggggatccggtggcgggggatccggtggcgggggatccctggtcccccggggcagcggaggcgacaaaactcacacatgcccaccgtgcccagctccagaactcctgggcggaccgtcagtcttcctcttccccccaaaacccaaggacaccctcatgatctcccggacccctgaggtcacatgcgtggtggtggacgtgagccacgaagaccctgaggtcaagttcaactggtacgtggacggcgtggaggtgcataatgccaagacaaagccgcgggaggagcagtacaacagcacgtaccgtgtggtcagcgtcctcaccgtcctgcaccaggactggctgaatggcaaggagtacaagtgcaaggtctccaacaaagccctcccagcccccatcgagaaaaccatctccaaagccaaagggcagccccgagaaccacaggtgtacaccctgcccccatcccgggatgagctgaccaagaaccaggtcagcctgacctgcctggtcaaaggcttctatcccagcgacatcgccgtggagtgggagagcaatgggcagccggagaacaactacaagaccacgcctcccgtgttggactccgacggctccttcttcctctacagcaagctcaccgtggacaagagcaggtggcagcaggggaacgtcttctcatgctccgtgatgcatgaggctctgcacaaccactacacgcagaagagcctctccctgtctccgggtaaatga

SEQ ID NO: 152 - protein, 1652 aa, Artificial Sequence
  VWF057
MIPARFAGVLLALALILPGTLCAEGTRGRSSTARCSLFGSDFVNTFDGSMYSFAGYCSYLLAGGCQKRSFSIIGDFQNGKRVSLSVYLGEFFDIHLFVNGTVTQGDQRVSMPYASKGLYLETEAGYYKLSGEAYGFVARIDGSGNFQVLLSDRYFNKTCGLCGNFNIFAEDDFMTQEGTLTSDPYDFANSWALSSGEQWCERASPPSSSCNISSGEMQKGLWEQCQLLKSTSVFARCHPLVDPEPFVALCEKTLCECAGGLECACPALLEYARTCAQEGMVLYGWTDHSACSPVCPAGMEYRQCVSPCARTCQSLHINEMCQERCVDGCSCPEGQLLDEGLCVESTECPCVHSGKRYPPGTSLSRDCNTCICRNSQWICSNEECPGECLVTGQSHFKSFDNRYFTFSGICQYLLARDCQDHSFSIVIETVQCADDRDAVCTRSVTVRLPGLHNSLVKLKHGAGVAMDGQDIQLPLLKGDLRIQHTVTASVRLSYGEDLQMDWDGRGRLLVKLSPVYAGKTCGLCGNYNGNQGDDFLTPSGLAEPRVEDFGNAWKLHGDCQDLQKQHSDPCALNPRMTRFSEEACAVLTSPTFEACHRAVSPLPYLRNCRYDVCSCSDGRECLCGALASYAAACAGRGVRVAWREPGRCELNCPKGQVYLQCGTPCNLTCRSLSYPDEECNEACLEGCFCPPGLYMDERGDCVPKAQCPCYYDGEIFQPEDIFSDHHTMCYCEDGFMHCTMSGVPGSLLPDAVLSSPLSHRSKRSLSCRPPMVKLVCPADNLRAEGLECTKTCQNYDLECMSMGCVSGCLCPPGMVRHENRCVALERCPCFHQGKEYAPGETVKIGCNTCVCRDRKWNCTDHVCDATCSTIGMAHYLTFDGLKYLFPGECQYVLVQDYCGSNPGTFRILVGNKGCSHPSVKCKKRVTILVEGGEIELFDGEVNVKRPMKDETHFEVVESGRYIILLLGKALSVVWDRHLSISVVLKQTYQEKVCGLCGNFDGIQNNDLTSSNLQVEEDPVDFGNSWKVSSQCADTRKVPLDSSPATCHNNIMKQTMVDSSCRILTSDVFQDCNKLVDPEPYLDVCIYDTCSCESIGDCAAFCDTIAAYAHVCAQHGKVVTWRTATLCPQSCEERNLRENGYEAEWRYNSCAPACQVTCQHPEPLACPVQCVEGCHAHCPPGKILDELLQTCVDPEDCPVCEVAGRRFASGKKVTLNPSDPEHCQICHCDVVNLTCEACQEPISGAPTSESATPESGPGSEPATSGSETPGTSESATPESGPGSEPATSGSETPGTSESATPESGPGTSTEPSEGSAPGSPAGSPTSTEEGTSESATPESGPGSEPATSGSETPGTSESATPESGPGSPAGSPTSTEEGSPAGSPTSTEEGASSGGGGSGGGGSGGGGSGGGGSGGGGSLVPRGSGGDKTHTCPPCPAPELLGGPSVFLFPPKPKDTLMISRTPEVTCVVVDVSHEDPEVKFNWYVDGVEVHNAKTKPREEQYNSTYRVVSVLTVLHQDWLNGKEYKCKVSNKALPAPIEKTISKAKGQPREPQVYTLPPSRDELTKNQVSLTCLVKGFYPSDIAVEWESNGQPENNYKTTPPVLDSDGSFFLYSKLTVDKSRWQQGNVFSCSVMHEALHNHYTQKSLSLSPGK

SEQ ID NO: 153 - DNA, 5379 bp, Artificial Sequence
  VWF058 (VWF034 with IHH mutation)
atgattcctgccagatttgccggggtgctgcttgctctggccctcattttgccagggaccctttgtgcagaaggaactcgcggcaggtcatccacggcccgatgcagccttttcggaagtgacttcgtcaacacctttgatgggagcatgtacagctttgcgggatactgcagttacctcctggcagggggctgccagaaacgctccttctcgattattggggacttccagaatggcaagagagtgagcctctccgtgtatcttggggaattttttgacatccatttgtttgtcaatggtaccgtgacacagggggaccaaagagtctccatgccctatgcctccaaagggctgtatctagaaactgaggctgggtactacaagctgtccggtgaggcctatggctttgtggccaggatcgatggcagcggcaactttcaagtcctgctgtcagacagatacttcaacaagacctgcgggctgtgtggcaactttaacatctttgctgaagatgactttatgacccaagaagggaccttgacctcggacccttatgactttgccaactcatgggctctgagcagtggagaacagtggtgtgaacgggcatctcctcccagcagctcatgcaacatctcctctggggaaatgcagaagggcctgtgggagcagtgccagcttctgaagagcacctcggtgtttgcccgctgccaccctctggtggaccccgagccttttgtggccctgtgtgagaagactttgtgtgagtgtgctggggggctggagtgcgcctgccctgccctcctggagtacgcccggacctgtgcccaggagggaatggtgctgtacggctggaccgaccacagcgcgtgcagcccagtgtgccctgctggtatggagtataggcagtgtgtgtccccttgcgccaggacctgccagagcctgcacatcaatgaaatgtgtcaggagcgatgcgtggatggctgcagctgccctgagggacagctcctggatgaaggcctctgcgtggagagcaccgagtgtccctgcgtgcattccggaaagcgctaccctcccggcacctccctctctcgagactgcaacacctgcatttgccgaaacagccagtggatctgcagcaatgaagaatgtccaggggagtgccttgtcactggtcaatcccacttcaagagctttgacaacagatacttcaccttcagtgggatctgccagtacctgctggcccgggattgccaggaccactccttctccattgtcattgagactgtccagtgtgctgatgaccgcgacgctgtgtgcacccgctccgtcaccgtccggctgcctggcctgcacaacagccttgtgaaactgaagcatggggcaggagttgccatggatggccaggacatccagctccccctcctgaaaggtgacctccgcatccagcatacagtgacggcctccgtgcgcctcagctacggggaggacctgcagatggactgggatggccgcgggaggctgctggtgaagctgtcccccgtctatgccgggaagacctgcggcctgtgtgggaattacaatggcaaccagggcgacgacttccttaccccctctgggctggcggagccccgggtggaggacttcgggaacgcctggaagctgcacggggactgccaggacctgcagaagcagcacagcgatccctgcgccctcaacccgcgcatgaccaggttctccgaggaggcgtgcgcggtcctgacgtcccccacattcgaggcctgccatcgtgccgtcagcccgctgccctacctgcggaactgccgctacgacgtgtgctcctgctcggacggccgcgagtgcctgtgcggcgccctggccagctatgccgcggcctgcgcggggagaggcgtgcgcgtcgcgtggcgcgagccaggccgctgtgagctgaactgcccgaaaggccaggtgtacctgcagtgcgggaccccctgcaacctgacctgccgctctctctcttacccggatgaggaatgcaatgaggcctgcctggagggctgcttctgccccccagggctctacatggatgagaggggggactgcgtgcccaaggcccagtgcccctgttactatgacggtgagatcttccagccagaagacatcttctcagaccatcacaccatgtgctactgtgaggatggcttcatgcactgtaccatgagtggagtccccggaagcttgctgcctgacgctgtcctcagcagtcccctgtctcatcgcagcaaaaggagcctatcctgtcggccccccatggtcaagctggtgtgtcccgctgacaacctgcgggctgaagggctcgagtgtaccaaaacgtgccagaactatgacctggagtgcatgagcatgggctgtgtctctggctgcctctgccccccgggcatggtccggcatgagaacagatgtgtggccctggaaaggtgtccctgcttccatcagggcaaggagtatgcccctggagaaacagtgaagattggctgcaacacttgtgtctgtcgggaccggaagtggaactgcacagaccatgtgtgtgatgccacgtgctccacgatcggcatggcccactacctcaccttcgacgggctcaaatacctgttccccggggagtgccagtacgttctggtgcaggattactgcggcagtaaccctgggacctttcggatcctagtggggaataagggatgcagccacccctcagtgaaatgcaagaaacgggtcaccatcctggtggagggaggagagattgagctgtttgacggggaggtgaatgtgaagaggcccatgaaggatgagactcactttgaggtggtggagtctggccggtacatcattctgctgctgggcaaagccctctccgtggtctgggaccgccacctgagcatctccgtggtcctgaagcagacataccaggagaaagtgtgtggcctgtgtgggaattttgatggcatccagaacaatgacctcaccagcagcaacctccaagtggaggaagaccctgtggactttgggaactcctggaaagtgagctcgcagtgtgctgacaccagaaaagtgcctctggactcatcccctgccacctgccataacaacatcatgaagcagacgatggtggattcctcctgtagaatccttaccagtgacgtcttccaggactgcaacaagctggtggaccccgagccatatctggatgtctgcatttacgacacctgctcctgtgagtccattggggactgcgccgcattctgcgacaccattgctgcctatgcccacgtgtgtgcccagcatggcaaggtggtgacctggaggacggccacattgtgcccccagagctgcgaggagaggaatctccgggagaacgggtatgaggctgagtggcgctataacagctgtgcacctgcctgtcaagtcacgtgtcagcaccctgagccactggcctgccctgtgcagtgtgtggagggctgccatgcccactgccctccagggaaaatcctggatgagcttttgcagacctgcgttgaccctgaagactgtccagtgtgtgaggtggctggccggcgttttgcctcaggaaagaaagtcaccttgaatcccagtgaccctgagcactgccagatttgccactgtgatgttgtcaacctcacctgtgaagcctgccaggagccgatatcgggtacctcagagtctgctacccccgagtcagggccaggatcagagccagccacctccgggtctgagacacccgggacttccgagagtgccacccctgagtccggacccgggtccgagcccgccacttccggctccgaaactcccggcacaagcgagagcgctaccccagagtcaggaccaggaacatctacagagccctctgaaggctccgctccagggtccccagccggcagtcccactagcaccgaggagggaacctctgaaagcgccacacccgaatcagggccagggtctgagcctgctaccagcggcagcgagacaccaggcacctctgagtccgccacaccagagtccggacccggatctcccgctgggagccccacctccactgaggagggatctcctgctggctctccaacatctactgaggaaggtacctcaaccgagccatccgagggatcagctcccggcacctcagagtcggcaaccccggagtctggacccggaacttccgaaagtgccacaccagagtccggtcccgggacttcagaatcagcaacacccgagtccggccctgggtctgaacccgccacaagtggtagtgagacaccaggatcagaacctgctacctcagggtcagagacacccggatctccggcaggctcaccaacctccactgaggagggcaccagcacagaaccaagcgagggctccgcacccggaacaagcactgaacccagtgagggttcagcacccggctctgagccggccacaagtggcagtgagacacccggcacttcagagagtgccacccccgagagtggcccaggcactagtaccgagccctctgaaggcagtgcgccagattctggcggtggaggttccggtggcgggggatccggtggcgggggatccggtggcgggggatccggtggcgggggatccctggtcccccggggcagcggaggcgacaaaactcacacatgcccaccgtgcccagctccagaactcctgggcggaccgtcagtcttcctcttccccccaaaacccaaggacaccctcatggcctcccggacccctgaggtcacatgcgtggtggtggacgtgagccacgaagaccctgaggtcaagttcaactggtacgtggacggcgtggaggtgcataatgccaagacaaagccgcgggaggagcagtacaacagcacgtaccgtgtggtcagcgtcctcaccgtcctggcccaggactggctgaatggcaaggagtacaagtgcaaggtctccaacaaagccctcccagcccccatcgagaaaaccatctccaaagccaaagggcagccccgagaaccacaggtgtacaccctgcccccatcccgcgatgagctgaccaagaaccaggtcagcctgacctgcctggtcaaaggcttctatcccagcgacatcgccgtggagtgggagagcaatgggcagccggagaacaactacaagaccacgcctcccgtgttggactccgacggctccttcttcctctacagcaagctcaccgtggacaagagcaggtggcagcaggggaacgtcttctcatgctccgtgatgcatgaggctctgcacaacgcctacacgcagaagagcctctccctgtctccgggtaaatga

SEQ ID NO: 154 - protein, 1792 aa, Artificial Sequence
  VWF058 (VWF034 with IHH mutation)
MIPARFAGVLLALALILPGTLCAEGTRGRSSTARCSLFGSDFVNTFDGSMYSFAGYCSYLLAGGCQKRSFSIIGDFQNGKRVSLSVYLGEFFDIHLFVNGTVTQGDQRVSMPYASKGLYLETEAGYYKLSGEAYGFVARIDGSGNFQVLLSDRYFNKTCGLCGNFNIFAEDDFMTQEGTLTSDPYDFANSWALSSGEQWCERASPPSSSCNISSGEMQKGLWEQCQLLKSTSVFARCHPLVDPEPFVALCEKTLCECAGGLECACPALLEYARTCAQEGMVLYGWTDHSACSPVCPAGMEYRQCVSPCARTCQSLHINEMCQERCVDGCSCPEGQLLDEGLCVESTECPCVHSGKRYPPGTSLSRDCNTCICRNSQWICSNEECPGECLVTGQSHFKSFDNRYFTFSGICQYLLARDCQDHSFSIVIETVQCADDRDAVCTRSVTVRLPGLHNSLVKLKHGAGVAMDGQDIQLPLLKGDLRIQHTVTASVRLSYGEDLQMDWDGRGRLLVKLSPVYAGKTCGLCGNYNGNQGDDFLTPSGLAEPRVEDFGNAWKLHGDCQDLQKQHSDPCALNPRMTRFSEEACAVLTSPTFEACHRAVSPLPYLRNCRYDVCSCSDGRECLCGALASYAAACAGRGVRVAWREPGRCELNCPKGQVYLQCGTPCNLTCRSLSYPDEECNEACLEGCFCPPGLYMDERGDCVPKAQCPCYYDGEIFQPEDIFSDHHTMCYCEDGFMHCTMSGVPGSLLPDAVLSSPLSHRSKRSLSCRPPMVKLVCPADNLRAEGLECTKTCQNYDLECMSMGCVSGCLCPPGMVRHENRCVALERCPCFHQGKEYAPGETVKIGCNTCVCRDRKWNCTDHVCDATCSTIGMAHYLTFDGLKYLFPGECQYVLVQDYCGSNPGTFRILVGNKGCSHPSVKCKKRVTILVEGGEIELFDGEVNVKRPMKDETHFEVVESGRYIILLLGKALSVVWDRHLSISVVLKQTYQEKVCGLCGNFDGIQNNDLTSSNLQVEEDPVDFGNSWKVSSQCADTRKVPLDSSPATCHNNIMKQTMVDSSCRILTSDVFQDCNKLVDPEPYLDVCIYDTCSCESIGDCAAFCDTIAAYAHVCAQHGKVVTWRTATLCPQSCEERNLRENGYEAEWRYNSCAPACQVTCQHPEPLACPVQCVEGCHAHCPPGKILDELLQTCVDPEDCPVCEVAGRRFASGKKVTLNPSDPEHCQICHCDVVNLTCEACQEPISGTSESATPESGPGSEPATSGSETPGTSESATPESGPGSEPATSGSETPGTSESATPESGPGTSTEPSEGSAPGSPAGSPTSTEEGTSESATPESGPGSEPATSGSETPGTSESATPESGPGSPAGSPTSTEEGSPAGSPTSTEEGTSTEPSEGSAPGTSESATPESGPGTSESATPESGPGTSESATPESGPGSEPATSGSETPGSEPATSGSETPGSPAGSPTSTEEGTSTEPSEGSAPGTSTEPSEGSAPGSEPATSGSETPGTSESATPESGPGTSTEPSEGSAPDSGGGGSGGGGSGGGGSGGGGSGGGGSLVPRGSGGDKTHTCPPCPAPELLGGPSVFLFPPKPKDTLMASRTPEVTCVVVDVSHEDPEVKFNWYVDGVEVHNAKTKPREEQYNSTYRVVSVLTVLAQDWLNGKEYKCKVSNKALPAPIEKTISKAKGQPREPQVYTLPPSRDELTKNQVSLTCLVKGFYPSDIAVEWESNGQPENNYKTTPPVLDSDGSFFLYSKLTVDKSRWQQGNVFSCSVMHEALHNAYTQKSLSLSPGK

SEQ ID NO: 155 - DNA, 5937 bp, Artificial Sequence
  FVIII 169
atgcaaatagagctctccacctgcttctttctgtgccttttgcgattctgctttagtgccaccagaagatactacctgggtgcagtggaactgtcatgggactatatgcaaagtgatctcggtgagctgcctgtggacgcaagatttcctcctagagtgccaaaatcttttccattcaacacctcagtcgtgtacaaaaagactctgtttgtagaattcacggatcaccttttcaacatcgctaagccaaggccaccctggatgggtctgctaggtcctaccatccaggctgaggtttatgatacagtggtcattacacttaagaacatggcttcccatcctgtcagtcttcatgctgttggtgtatcctactggaaagcttctgagggagctgaatatgatgatcagaccagtcaaagggagaaagaagatgataaagtcttccctggtggaagccatacatatgtctggcaggtcctgaaagagaatggtccaatggcctctgacccactgtgccttacctactcatatctttctcatgtggacctggtaaaagacttgaattcaggcctcattggagccctactagtatgtagagaagggagtctggccaaggaaaagacacagaccttgcacaaatttatactactttttgctgtatttgatgaagggaaaagttggcactcagaaacaaagaactccttgatgcaggatagggatgctgcatctgctcgggcctggcctaaaatgcacacagtcaatggttatgtaaacaggtctctgccaggtctgattggatgccacaggaaatcagtctattggcatgtgattggaatgggcaccactcctgaagtgcactcaatattcctcgaaggtcacacatttcttgtgaggaaccatcgccaggctagcttggaaatctcgccaataactttccttactgctcaaacactcttgatggaccttggacagtttctactgttttgtcatatctcttcccaccaacatgatggcatggaagcttatgtcaaagtagacagctgtccagaggaaccccaactacgaatgaaaaataatgaagaagcggaagactatgatgatgatcttactgattctgaaatggatgtggtcaggtttgatgatgacaactctccttcctttatccaaattcgctcagttgccaagaagcatcctaaaacttgggtacattacattgctgctgaagaggaggactgggactatgctcccttagtcctcgcccccgatgacagaagttataaaagtcaatatttgaacaatggccctcagcggattggtaggaagtacaaaaaagtccgatttatggcatacacagatgaaacctttaagactcgtgaagctattcagcatgaatcaggaatcttgggacctttactttatggggaagttggagacacactgttgattatatttaagaatcaagcaagcagaccatataacatctaccctcacggaatcactgatgtccgtcctttgtattcaaggagattaccaaaaggtgtaaaacatttgaaggattttccaattctgccaggagaaatattcaaatataaatggacagtgactgtagaagatgggccaactaaatcagatcctcggtgcctgacccgctattactctagtttcgttaatatggagagagatctagcttcaggactcattggccctctcctcatctgctacaaagaatctgtagatcaaagaggaaaccagataatgtcagacaagaggaatgtcatcctgttttctgtatttgatgagaaccgaagctggtacctcacagagaatatacaacgctttctccccaatccagctggagtgcagcttgaggatccagagttccaagcctccaacatcatgcacagcatcaatggctatgtttttgatagtttgcagttgtcagtttgtttgcatgaggtggcatactggtacattctaagcattggagcacagactgacttcctttctgtcttcttctctggatataccttcaaacacaaaatggtctatgaagacacactcaccctattcccattctcaggagaaactgtcttcatgtcgatggaaaacccaggtctatggattctggggtgccacaactcagactttcggaacagaggcatgaccgccttactgaaggtttctagttgtgacaagaacactggtgattattacgaggacagttatgaagatatttcagcatacttgctgagtaaaaacaatgccattgaaccaagaagcttctctcaaaacggcgcgccaggtacctcagagtctgctacccccgagtcagggccaggatcagagccagccacctccgggtctgagacacccgggacttccgagagtgccacccctgagtccggacccgggtccgagcccgccacttccggctccgaaactcccggcacaagcgagagcgctaccccagagtcaggaccaggaacatctacagagccctctgaaggctccgctccagggtccccagccggcagtcccactagcaccgaggagggaacctctgaaagcgccacacccgaatcagggccagggtctgagcctgctaccagcggcagcgagacaccaggcacctctgagtccgccacaccagagtccggacccggatctcccgctgggagccccacctccactgaggagggatctcctgctggctctccaacatctactgaggaaggtacctcaaccgagccatccgagggatcagctcccggcacctcagagtcggcaaccccggagtctggacccggaacttccgaaagtgccacaccagagtccggtcccgggacttcagaatcagcaacacccgagtccggccctgggtctgaacccgccacaagtggtagtgagacaccaggatcagaacctgctacctcagggtcagagacacccggatctccggcaggctcaccaacctccactgaggagggcaccagcacagaaccaagcgagggctccgcacccggaacaagcactgaacccagtgagggttcagcacccggctctgagccggccacaagtggcagtgagacacccggcacttcagagagtgccacccccgagagtggcccaggcactagtaccgagccctctgaaggcagtgcgccagcctcgagcccaccagtcttgaaacgccatcaagctgaaataactcgtactactcttcagtcagatcaagaggaaatcgattatgatgataccatatcagttgaaatgaagaaggaagattttgacatttatgatgaggatgaaaatcagagcccccgcagctttcaaaagaaaacacgacactattttattgctgcagtggagaggctctgggattatgggatgagtagctccccacatgttctaagaaacagggctcagagtggcagtgtccctcagttcaagaaagttgttttccaggaatttactgatggctcctttactcagcccttataccgtggagaactaaatgaacatttgggactcctggggccatatataagagcagaagttgaagataatatcatggtaactttcagaaatcaggcctctcgtccctattccttctattctagccttatttcttatgaggaagatcagaggcaaggagcagaacctagaaaaaactttgtcaagcctaatgaaaccaaaacttacttttggaaagtgcaacatcatatggcacccactaaagatgagtttgactgcaaagcctgggcttatttctctgatgttgacctggaaaaagatgtgcactcaggcctgattggaccccttctggtctgccacactaacacactgaaccctgctcatgggagacaagtgacagtacaggaatttgctctgtttttcaccatctttgatgagaccaaaagctggtacttcactgaaaatatggaaagaaactgcagggctccctgcaatatccagatggaagatcccacttttaaagagaattatcgcttccatgcaatcaatggctacataatggatacactacctggcttagtaatggctcaggatcaaaggattcgatggtatctgctcagcatgggcagcaatgaaaacatccattctattcatttcagtggacatgtgttcactgtacgaaaaaaagaggagtataaaatggcactgtacaatctctatccaggtgtttttgagacagtggaaatgttaccatccaaagctggaatttggcgggtggaatgccttattggcgagcatctacatgctgggatgagcacactttttctggtgtacagcaataagtgtcagactcccctgggaatggcttctggacacattagagattttcagattacagcttcaggacaatatggacagtgggccccaaagctggccagacttcattattccggatcaatcaatgcctggagcaccaaggagcccttttcttggatcaaggtggatctgttggcaccaatgattattcacggcatcaagacccagggtgcccgtcagaagttctccagcctctacatctctcagtttatcatcatgtatagtcttgatgggaagaagtggcagacttatcgaggaaattccactggaaccttaatggtcttctttggcaatgtggattcatctgggataaaacacaatatttttaaccctccaattattgctcgatacatccgtttgcacccaactcattatagcattcgcagcactcttcgcatggagttgatgggctgtgatttaaatagttgcagcatgccattgggaatggagagtaaagcaatatcagatgcacagattactgcttcatcctactttaccaatatgtttgccacctggtctccttcaaaagctcgacttcacctccaagggaggagtaatgcctggagacctcaggtgaataatccaaaagagtggctgcaagtggacttccagaagacaatgaaagtcacaggagtaactactcagggagtaaaatctctgcttaccagcatgtatgtgaaggagttcctcatctccagcagtcaagatggccatcagtggactctcttttttcagaatggcaaagtaaaggtttttcagggaaatcaagactccttcacacctgtggtgaactctctagacccaccgttactgactcgctaccttcgaattcacccccagagttgggtgcaccagattgccctgaggatggaggttctgggctgcgaggcacaggacctctacgacaaaactcacacatgcccaccgtgcccagctccagaactcctgggcggaccgtcagtcttcctcttccccccaaaacccaaggacaccctcatgatctcccggacccctgaggtcacatgcgtggtggtggacgtgagccacgaagaccctgaggtcaagttcaactggtacgtggacggcgtggaggtgcataatgccaagacaaagccgcgggaggagcagtacaacagcacgtaccgtgtggtcagcgtcctcaccgtcctgcaccaggactggctgaatggcaaggagtacaagtgcaaggtctccaacaaagccctcccagcccccatcgagaaaaccatctccaaagccaaagggcagccccgagaaccacaggtgtacaccctgcccccatcccgggatgagctgaccaagaaccaggtcagcctgacctgcctggtcaaaggcttctatcccagcgacatcgccgtggagtgggagagcaatgggcagccggagaacaactacaagaccacgcctcccgtgttggactccgacggctccttcttcctctacagcaagctcaccgtggacaagagcaggtggcagcaggggaacgtcttctcatgctccgtgatgcatgaggctctgcacaaccactacacgcagaagagcctctccctgtctccgggtaaatga

SEQ ID NO: 156 - DNA, 6387 bp, Artificial Sequence
  FVIII 263 (IHH triple mutant)
atgcaaatagagctctccacctgcttctttctgtgccttttgcgattctgctttagtgccaccagaagatactacctgggtgcagtggaactgtcatgggactatatgcaaggcgcgccaacatcagagagcgccacccctgaaagtggtcccgggagcgagccagccacatctgggtcggaaacgccaggcacaagtgagtctgcaactcccgagtccggacctggctccgagcctgccactagcggctccgagactccgggaacttccgagagcgctacaccagaaagcggacccggaaccagtaccgaacctagcgagggctctgctccgggcagcccagccggctctcctacatccacggaggagggcacttccgaatccgccaccccggagtcagggccaggatctgaacccgctacctcaggcagtgagacgccaggaacgagcgagtccgctacaccggagagtgggccagggagccctgctggatctcctacgtccactgaggaagggtcaccagcgggctcgcccaccagcactgaagaaggtgcctcgagcagtgatctcggtgagctgcctgtggacgcaagatttcctcctagagtgccaaaatcttttccattcaacacctcagtcgtgtacaaaaagactctgtttgtagaattcacggatcaccttttcaacatcgctaagccaaggccaccctggatgggtctgctaggtcctaccatccaggctgaggtttatgatacagtggtcattacacttaagaacatggcttcccatcctgtcagtcttcatgctgttggtgtatcctactggaaagcttctgagggagctgaatatgatgatcagaccagtcaaagggagaaagaagatgataaagtcttccctggtggaagccatacatatgtctggcaggtcctgaaagagaatggtccaatggcctctgacccactgtgccttacctactcatatctttctcatgtggacctggtaaaagacttgaattcaggcctcattggagccctactagtatgtagagaagggagtctggccaaggaaaagacacagaccttgcacaaatttatactactttttgctgtatttgatgaagggaaaagttggcactcagaaacaaagaactccttgatgcaggatagggatgctgcatctgctcgggcctggcctaaaatgcacacagtcaatggttatgtaaacaggtctctgccaggtctgattggatgccacaggaaatcagtctattggcatgtgattggaatgggcaccactcctgaagtgcactcaatattcctcgaaggtcacacatttcttgtgaggaaccatcgccaggctagcttggaaatctcgccaataactttccttactgctcaaacactcttgatggaccttggacagtttctactgttttgtcatatctcttcccaccaacatgatggcatggaagcttatgtcaaagtagacagctgtccagaggaaccccaactacgaatgaaaaataatgaagaagcggaagactatgatgatgatcttactgattctgaaatggatgtggtcaggtttgatgatgacaactctccttcctttatccaaattcgctcagttgccaagaagcatcctaaaacttgggtacattacattgctgctgaagaggaggactgggactatgctcccttagtcctcgcccccgatgacagaagttataaaagtcaatatttgaacaatggccctcagcggattggtaggaagtacaaaaaagtccgatttatggcatacacagatgaaacctttaagactcgtgaagctattcagcatgaatcaggaatcttgggacctttactttatggggaagttggagacacactgttgattatatttaagaatcaagcaagcagaccatataacatctaccctcacggaatcactgatgtccgtcctttgtattcaaggagattaccaaaaggtgtaaaacatttgaaggattttccaattctgccaggagaaatattcaaatataaatggacagtgactgtagaagatgggccaactaaatcagatcctcggtgcctgacccgctattactctagtttcgttaatatggagagagatctagcttcaggactcattggccctctcctcatctgctacaaagaatctgtagatcaaagaggaaaccagataatgtcagacaagaggaatgtcatcctgttttctgtatttgatgagaaccgaagctggtacctcacagagaatatacaacgctttctccccaatccagctggagtgcagcttgaggatccagagttccaagcctccaacatcatgcacagcatcaatggctatgtttttgatagtttgcagttgtcagtttgtttgcatgaggtggcatactggtacattctaagcattggagcacagactgacttcctttctgtcttcttctctggatataccttcaaacacaaaatggtctatgaagacacactcaccctattcccattctcaggagaaactgtcttcatgtcgatggaaaacccaggtctatggattctggggtgccacaactcagactttcggaacagaggcatgaccgccttactgaaggtttctagttgtgacaagaacactggtgattattacgaggacagttatgaagatatttcagcatacttgctgagtaaaaacaatgccattgaaccaagaagcttctctcaaaacggcgcgccaggtacctcagagtctgctacccccgagtcagggccaggatcagagccagccacctccgggtctgagacacccgggacttccgagagtgccacccctgagtccggacccgggtccgagcccgccacttccggctccgaaactcccggcacaagcgagagcgctaccccagagtcaggaccaggaacatctacagagccctctgaaggctccgctccagggtccccagccggcagtcccactagcaccgaggagggaacctctgaaagcgccacacccgaatcagggccagggtctgagcctgctaccagcggcagcgagacaccaggcacctctgagtccgccacaccagagtccggacccggatctcccgctgggagccccacctccactgaggagggatctcctgctggctctccaacatctactgaggaaggtacctcaaccgagccatccgagggatcagctcccggcacctcagagtcggcaaccccggagtctggacccggaacttccgaaagtgccacaccagagtccggtcccgggacttcagaatcagcaacacccgagtccggccctgggtctgaacccgccacaagtggtagtgagacaccaggatcagaacctgctacctcagggtcagagacacccggatctccggcaggctcaccaacctccactgaggagggcaccagcacagaaccaagcgagggctccgcacccggaacaagcactgaacccagtgagggttcagcacccggctctgagccggccacaagtggcagtgagacacccggcacttcagagagtgccacccccgagagtggcccaggcactagtaccgagccctctgaaggcagtgcgccagcctcgagcccaccagtcttgaaacgccatcaagctgaaataactcgtactactcttcagtcagatcaagaggaaatcgattatgatgataccatatcagttgaaatgaagaaggaagattttgacatttatgatgaggatgaaaatcagagcccccgcagctttcaaaagaaaacacgacactattttattgctgcagtggagaggctctgggattatgggatgagtagctccccacatgttctaagaaacagggctcagagtggcagtgtccctcagttcaagaaagttgttttccaggaatttactgatggctcctttactcagcccttataccgtggagaactaaatgaacatttgggactcctggggccatatataagagcagaagttgaagataatatcatggtaactttcagaaatcaggcctctcgtccctattccttctattctagccttatttcttatgaggaagatcagaggcaaggagcagaacctagaaaaaactttgtcaagcctaatgaaaccaaaacttacttttggaaagtgcaacatcatatggcacccactaaagatgagtttgactgcaaagcctgggcttatttctctgatgttgacctggaaaaagatgtgcactcaggcctgattggaccccttctggtctgccacactaacacactgaaccctgctcatgggagacaagtgacagtacaggaatttgctctgtttttcaccatctttgatgagaccaaaagctggtacttcactgaaaatatggaaagaaactgcagggctccctgcaatatccagatggaagatcccacttttaaagagaattatcgcttccatgcaatcaatggctacataatggatacactacctggcttagtaatggctcaggatcaaaggattcgatggtatctgctcagcatgggcagcaatgaaaacatccattctattcatttcagtggacatgtgttcactgtacgaaaaaaagaggagtataaaatggcactgtacaatctctatccaggtgtttttgagacagtggaaatgttaccatccaaagctggaatttggcgggtggaatgccttattggcgagcatctacatgctgggatgagcacactttttctggtgtacagcaataagtgtcagactcccctgggaatggcttctggacacattagagattttcagattacagcttcaggacaatatggacagtgggccccaaagctggccagacttcattattccggatcaatcaatgcctggagcaccaaggagcccttttcttggatcaaggtggatctgttggcaccaatgattattcacggcatcaagacccagggtgcccgtcagaagttctccagcctctacatctctcagtttatcatcatgtatagtcttgatgggaagaagtggcagacttatcgaggaaattccactggaaccttaatggtcttctttggcaatgtggattcatctgggataaaacacaatatttttaaccctccaattattgctcgatacatccgtttgcacccaactcattatagcattcgcagcactcttcgcatggagttgatgggctgtgatttaaatagttgcagcatgccattgggaatggagagtaaagcaatatcagatgcacagattactgcttcatcctactttaccaatatgtttgccacctggtctccttcaaaagctcgacttcacctccaagggaggagtaatgcctggagacctcaggtgaataatccaaaagagtggctgcaagtggacttccagaagacaatgaaagtcacaggagtaactactcagggagtaaaatctctgcttaccagcatgtatgtgaaggagttcctcatctccagcagtcaagatggccatcagtggactctcttttttcagaatggcaaagtaaaggtttttcagggaaatcaagactccttcacacctgtggtgaactctctagacccaccgttactgactcgctaccttcgaattcacccccagagttgggtgcaccagattgccctgaggatggaggttctgggctgcgaggcacaggacctctacgacaaaactcacacatgcccaccgtgcccagctccagaactcctgggcggaccgtcagtcttcctcttccccccaaaacccaaggacaccctcatggcctcccggacccctgaggtcacatgcgtggtggtggacgtgagccacgaagaccctgaggtcaagttcaactggtacgtggacggcgtggaggtgcataatgccaagacaaagccgcgggaggagcagtacaacagcacgtaccgtgtggtcagcgtcctcaccgtcctggcccaggactggctgaatggcaaggagtacaagtgcaaggtctccaacaaagccctcccagcccccatcgagaaaaccatctccaaagccaaagggcagccccgagaaccacaggtgtacaccctgcccccatcccgcgatgagctgaccaagaaccaggtcagcctgacctgcctggtcaaaggcttctatcccagcgacatcgccgtggagtgggagagcaatgggcagccggagaacaactacaagaccacgcctcccgtgttggactccgacggctccttcttcctctacagcaagctcaccgtggacaagagcaggtggcagcaggggaacgtcttctcatgctccgtgatgcatgaggctctgcacaacgcctacacgcagaagagcctctccctgtctccgggtaaatga

SEQ ID NO: 157 - protein, 2128 aa, Artificial Sequence
  FVIII 263 (IHH triple mutant)
MQIELSTCFFLCLLRFCFSATRRYYLGAVELSWDYMQGAPTSESATPESGPGSEPATSGSETPGTSESATPESGPGSEPATSGSETPGTSESATPESGPGTSTEPSEGSAPGSPAGSPTSTEEGTSESATPESGPGSEPATSGSETPGTSESATPESGPGSPAGSPTSTEEGSPAGSPTSTEEGASSSDLGELPVDARFPPRVPKSFPFNTSVVYKKTLFVEFTDHLFNIAKPRPPWMGLLGPTIQAEVYDTVVITLKNMASHPVSLHAVGVSYWKASEGAEYDDQTSQREKEDDKVFPGGSHTYVWQVLKENGPMASDPLCLTYSYLSHVDLVKDLNSGLIGALLVCREGSLAKEKTQTLHKFILLFAVFDEGKSWHSETKNSLMQDRDAASARAWPKMHTVNGYVNRSLPGLIGCHRKSVYWHVIGMGTTPEVHSIFLEGHTFLVRNHRQASLEISPITFLTAQTLLMDLGQFLLFCHISSHQHDGMEAYVKVDSCPEEPQLRMKNNEEAEDYDDDLTDSEMDVVRFDDDNSPSFIQIRSVAKKHPKTWVHYIAAEEEDWDYAPLVLAPDDRSYKSQYLNNGPQRIGRKYKKVRFMAYTDETFKTREAIQHESGILGPLLYGEVGDTLLIIFKNQASRPYNIYPHGITDVRPLYSRRLPKGVKHLKDFPILPGEIFKYKWTVTVEDGPTKSDPRCLTRYYSSFVNMERDLASGLIGPLLICYKESVDQRGNQIMSDKRNVILFSVFDENRSWYLTENIQRFLPNPAGVQLEDPEFQASNIMHSINGYVFDSLQLSVCLHEVAYWYILSIGAQTDFLSVFFSGYTFKHKMVYEDTLTLFPFSGETVFMSMENPGLWILGCHNSDFRNRGMTALLKVSSCDKNTGDYYEDSYEDISAYLLSKNNAIEPRSFSQNGAPGTSESATPESGPGSEPATSGSETPGTSESATPESGPGSEPATSGSETPGTSESATPESGPGTSTEPSEGSAPGSPAGSPTSTEEGTSESATPESGPGSEPATSGSETPGTSESATPESGPGSPAGSPTSTEEGSPAGSPTSTEEGTSTEPSEGSAPGTSESATPESGPGTSESATPESGPGTSESATPESGPGSEPATSGSETPGSEPATSGSETPGSPAGSPTSTEEGTSTEPSEGSAPGTSTEPSEGSAPGSEPATSGSETPGTSESATPESGPGTSTEPSEGSAPASSPPVLKRHQAEITRTTLQSDQEEIDYDDTISVEMKKEDFDIYDEDENQSPRSFQKKTRHYFIAAVERLWDYGMSSSPHVLRNRAQSGSVPQFKKVVFQEFTDGSFTQPLYRGELNEHLGLLGPYIRAEVEDNIMVTFRNQASRPYSFYSSLISYEEDQRQGAEPRKNFVKPNETKTYFWKVQHHMAPTKDEFDCKAWAYFSDVDLEKDVHSGLIGPLLVCHTNTLNPAHGRQVTVQEFALFFTIFDETKSWYFTENMERNCRAPCNIQMEDPTFKENYRFHAINGYIMDTLPGLVMAQDQRIRWYLLSMGSNENIHSIHFSGHVFTVRKKEEYKMALYNLYPGVFETVEMLPSKAGIWRVECLIGEHLHAGMSTLFLVYSNKCQTPLGMASGHIRDFQITASGQYGQWAPKLARLHYSGSINAWSTKEPFSWIKVDLLAPMIIHGIKTQGARQKFSSLYISQFIIMYSLDGKKWQTYRGNSTGTLMVFFGNVDSSGIKHNIFNPPIIARYIRLHPTHYSIRSTLRMELMGCDLNSCSMPLGMESKAISDAQITASSYFTNMFATWSPSKARLHLQGRSNAWRPQVNNPKEWLQVDFQKTMKVTGVTTQGVKSLLTSMYVKEFLISSSQDGHQWTLFFQNGKVKVFQGNQDSFTPVVNSLDPPLLTRYLRIHPQSWVHQIALRMEVLGCEAQDLYDKTHTCPPCPAPELLGGPSVFLFPPKPKDTLMASRTPEVTCVVVDVSHEDPEVKFNWYVDGVEVHNAKTKPREEQYNSTYRVVSVLTVLAQDWLNGKEYKCKVSNKALPAPIEKTISKAKGQPREPQVYTLPPSRDELTKNQVSLTCLVKGFYPSDIAVEWESNGQPENNYKTTPPVLDSDGSFFLYSKLTVDKSRWQQGNVFSCSVMHEALHNAYTQKSLSLSPGK

SEQ ID NO: 158 - DNA, 5505 bp, Artificial Sequence
  FVIII 282
atgcaaatagagctctccacctgcttctttctgtgccttttgcgattctgctttagtgccaccagaagatactacctgggtgcagtggaactgtcatgggactatatgcaaagtgatctcggtgagctgcctgtggacgcaagatttcctcctagagtgccaaaatcttttccattcaacacctcagtcgtgtacaaaaagactctgtttgtagaattcacggatcaccttttcaacatcgctaagccaaggccaccctggatgggtctgctaggtcctaccatccaggctgaggtttatgatacagtggtcattacacttaagaacatggcttcccatcctgtcagtcttcatgctgttggtgtatcctactggaaagcttctgagggagctgaatatgatgatcagaccagtcaaagggagaaagaagatgataaagtcttccctggtggaagccatacatatgtctggcaggtcctgaaagagaatggtccaatggcctctgacccactgtgccttacctactcatatctttctcatgtggacctggtaaaagacttgaattcaggcctcattggagccctactagtatgtagagaagggagtctggccaaggaaaagacacagaccttgcacaaatttatactactttttgctgtatttgatgaagggaaaagttggcactcagaaacaaagaactccttgatgcaggatagggatgctgcatctgctcgggcctggcctaaaatgcacacagtcaatggttatgtaaacaggtctctgccaggtctgattggatgccacaggaaatcagtctattggcatgtgattggaatgggcaccactcctgaagtgcactcaatattcctcgaaggtcacacatttcttgtgaggaaccatcgccaggctagcttggaaatctcgccaataactttccttactgctcaaacactcttgatggaccttggacagtttctactgttttgtcatatctcttcccaccaacatgatggcatggaagcttatgtcaaagtagacagctgtccagaggaaccccaactacgaatgaaaaataatgaagaagcggaagactatgatgatgatcttactgattctgaaatggatgtggtcaggtttgatgatgacaactctccttcctttatccaaattcgctcagttgccaagaagcatcctaaaacttgggtacattacattgctgctgaagaggaggactgggactatgctcccttagtcctcgcccccgatgacagaagttataaaagtcaatatttgaacaatggccctcagcggattggtaggaagtacaaaaaagtccgatttatggcatacacagatgaaacctttaagactcgtgaagctattcagcatgaatcaggaatcttgggacctttactttatggggaagttggagacacactgttgattatatttaagaatcaagcaagcagaccatataacatctaccctcacggaatcactgatgtccgtcctttgtattcaaggagattaccaaaaggtgtaaaacatttgaaggattttccaattctgccaggagaaatattcaaatataaatggacagtgactgtagaagatgggccaactaaatcagatcctcggtgcctgacccgctattactctagtttcgttaatatggagagagatctagcttcaggactcattggccctctcctcatctgctacaaagaatctgtagatcaaagaggaaaccagataatgtcagacaagaggaatgtcatcctgttttctgtatttgatgagaaccgaagctggtacctcacagagaatatacaacgctttctccccaatccagctggagtgcagcttgaggatccagagttccaagcctccaacatcatgcacagcatcaatggctatgtttttgatagtttgcagttgtcagtttgtttgcatgaggtggcatactggtacattctaagcattggagcacagactgacttcctttctgtcttcttctctggatataccttcaaacacaaaatggtctatgaagacacactcaccctattcccattctcaggagaaactgtcttcatgtcgatggaaaacccaggtctatggattctggggtgccacaactcagactttcggaacagaggcatgaccgccttactgaaggtttctagttgtgacaagaacactggtgattattacgaggacagttatgaagatatttcagcatacttgctgagtaaaaacaatgccattgaaccaagaagcttctctcaaaacggcgcgccaacatcagagagcgccacccctgaaagtggtcccgggagcgagccagccacatctgggtcggaaacgccaggcacaagtgagtctgcaactcccgagtccggacctggctccgagcctgccactagcggctccgagactccgggaacttccgagagcgctacaccagaaagcggacccggaaccagtaccgaacctagcgagggctctgctccgggcagcccagccggctctcctacatccacggaggagggcacttccgaatccgccaccccggagtcagggccaggatctgaacccgctacctcaggcagtgagacgccaggaacgagcgagtccgctacaccggagagtgggccagggagccctgctggatctcctacgtccactgaggaagggtcaccagcgggctcgcccaccagcactgaagaaggtgcctcgagcccaccagtcttgaaacgccatcaagctgaaataactcgtactactcttcagtcagatcaagaggaaatcgattatgatgataccatatcagttgaaatgaagaaggaagattttgacatttatgatgaggatgaaaatcagagcccccgcagctttcaaaagaaaacacgacactattttattgctgcagtggagaggctctgggattatgggatgagtagctccccacatgttctaagaaacagggctcagagtggcagtgtccctcagttcaagaaagttgttttccaggaatttactgatggctcctttactcagcccttataccgtggagaactaaatgaacatttgggactcctggggccatatataagagcagaagttgaagataatatcatggtaactttcagaaatcaggcctctcgtccctattccttctattctagccttatttcttatgaggaagatcagaggcaaggagcagaacctagaaaaaactttgtcaagcctaatgaaaccaaaacttacttttggaaagtgcaacatcatatggcacccactaaagatgagtttgactgcaaagcctgggcttatttctctgatgttgacctggaaaaagatgtgcactcaggcctgattggaccccttctggtctgccacactaacacactgaaccctgctcatgggagacaagtgacagtacaggaatttgctctgtttttcaccatctttgatgagaccaaaagctggtacttcactgaaaatatggaaagaaactgcagggctccctgcaatatccagatggaagatcccacttttaaagagaattatcgcttccatgcaatcaatggctacataatggatacactacctggcttagtaatggctcaggatcaaaggattcgatggtatctgctcagcatgggcagcaatgaaaacatccattctattcatttcagtggacatgtgttcactgtacgaaaaaaagaggagtataaaatggcactgtacaatctctatccaggtgtttttgagacagtggaaatgttaccatccaaagctggaatttggcgggtggaatgccttattggcgagcatctacatgctgggatgagcacactttttctggtgtacagcaataagtgtcagactcccctgggaatggcttctggacacattagagattttcagattacagcttcaggacaatatggacagtgggccccaaagctggccagacttcattattccggatcaatcaatgcctggagcaccaaggagcccttttcttggatcaaggtggatctgttggcaccaatgattattcacggcatcaagacccagggtgcccgtcagaagttctccagcctctacatctctcagtttatcatcatgtatagtcttgatgggaagaagtggcagacttatcgaggaaattccactggaaccttaatggtcttctttggcaatgtggattcatctgggataaaacacaatatttttaaccctccaattattgctcgatacatccgtttgcacccaactcattatagcattcgcagcactcttcgcatggagttgatgggctgtgatttaaatagttgcagcatgccattgggaatggagagtaaagcaatatcagatgcacagattactgcttcatcctactttaccaatatgtttgccacctggtctccttcaaaagctcgacttcacctccaagggaggagtaatgcctggagacctcaggtgaataatccaaaagagtggctgcaagtggacttccagaagacaatgaaagtcacaggagtaactactcagggagtaaaatctctgcttaccagcatgtatgtgaaggagttcctcatctccagcagtcaagatggccatcagtggactctcttttttcagaatggcaaagtaaaggtttttcagggaaatcaagactccttcacacctgtggtgaactctctagacccaccgttactgactcgctaccttcgaattcacccccagagttgggtgcaccagattgccctgaggatggaggttctgggctgcgaggcacaggacctctacgacaaaactcacacatgcccaccgtgcccagctccagaactcctgggcggaccgtcagtcttcctcttccccccaaaacccaaggacaccctcatgatctcccggacccctgaggtcacatgcgtggtggtggacgtgagccacgaagaccctgaggtcaagttcaactggtacgtggacggcgtggaggtgcataatgccaagacaaagccgcgggaggagcagtacaacagcacgtaccgtgtggtcagcgtcctcaccgtcctgcaccaggactggctgaatggcaaggagtacaagtgcaaggtctccaacaaagccctcccagcccccatcgagaaaaccatctccaaagccaaagggcagccccgagaaccacaggtgtacaccctgcccccatcccgggatgagctgaccaagaaccaggtcagcctgacctgcctggtcaaaggcttctatcccagcgacatcgccgtggagtgggagagcaatgggcagccggagaacaactacaagaccacgcctcccgtgttggactccgacggctccttcttcctctacagcaagctcaccgtggacaagagcaggtggcagcaggggaacgtcttctcatgctccgtgatgcatgaggctctgcacaaccactacacgcagaagagcctctccctgtctccgggtaaatga

SEQ ID NO: 159 - protein, 1834 aa, Artificial Sequence
  FVIII 282
MQIELSTCFFLCLLRFCFSATRRYYLGAVELSWDYMQSDLGELPVDARFPPRVPKSFPFNTSVVYKKTLFVEFTDHLFNIAKPRPPWMGLLGPTIQAEVYDTVVITLKNMASHPVSLHAVGVSYWKASEGAEYDDQTSQREKEDDKVFPGGSHTYVWQVLKENGPMASDPLCLTYSYLSHVDLVKDLNSGLIGALLVCREGSLAKEKTQTLHKFILLFAVFDEGKSWHSETKNSLMQDRDAASARAWPKMHTVNGYVNRSLPGLIGCHRKSVYWHVIGMGTTPEVHSIFLEGHTFLVRNHRQASLEISPITFLTAQTLLMDLGQFLLFCHISSHQHDGMEAYVKVDSCPEEPQLRMKNNEEAEDYDDDLTDSEMDVVRFDDDNSPSFIQIRSVAKKHPKTWVHYIAAEEEDWDYAPLVLAPDDRSYKSQYLNNGPQRIGRKYKKVRFMAYTDETFKTREAIQHESGILGPLLYGEVGDTLLIIFKNQASRPYNIYPHGITDVRPLYSRRLPKGVKHLKDFPILPGEIFKYKWTVTVEDGPTKSDPRCLTRYYSSFVNMERDLASGLIGPLLICYKESVDQRGNQIMSDKRNVILFSVFDENRSWYLTENIQRFLPNPAGVQLEDPEFQASNIMHSINGYVFDSLQLSVCLHEVAYWYILSIGAQTDFLSVFFSGYTFKHKMVYEDTLTLFPFSGETVFMSMENPGLWILGCHNSDFRNRGMTALLKVSSCDKNTGDYYEDSYEDISAYLLSKNNAIEPRSFSQNGAPTSESATPESGPGSEPATSGSETPGTSESATPESGPGSEPATSGSETPGTSESATPESGPGTSTEPSEGSAPGSPAGSPTSTEEGTSESATPESGPGSEPATSGSETPGTSESATPESGPGSPAGSPTSTEEGSPAGSPTSTEEGASSPPVLKRHQAEITRTTLQSDQEEIDYDDTISVEMKKEDFDIYDEDENQSPRSFQKKTRHYFIAAVERLWDYGMSSSPHVLRNRAQSGSVPQFKKVVFQEFTDGSFTQPLYRGELNEHLGLLGPYIRAEVEDNIMVTFRNQASRPYSFYSSLISYEEDQRQGAEPRKNFVKPNETKTYFWKVQHHMAPTKDEFDCKAWAYFSDVDLEKDVHSGLIGPLLVCHTNTLNPAHGRQVTVQEFALFFTIFDETKSWYFTENMERNCRAPCNIQMEDPTFKENYRFHAINGYIMDTLPGLVMAQDQRIRWYLLSMGSNENIHSIHFSGHVFTVRKKEEYKMALYNLYPGVFETVEMLPSKAGIWRVECLIGEHLHAGMSTLFLVYSNKCQTPLGMASGHIRDFQITASGQYGQWAPKLARLHYSGSINAWSTKEPFSWIKVDLLAPMIIHGIKTQGARQKFSSLYISQFIIMYSLDGKKWQTYRGNSTGTLMVFFGNVDSSGIKHNIFNPPIIARYIRLHPTHYSIRSTLRMELMGCDLNSCSMPLGMESKAISDAQITASSYFTNMFATWSPSKARLHLQGRSNAWRPQVNNPKEWLQVDFQKTMKVTGVTTQGVKSLLTSMYVKEFLISSSQDGHQWTLFFQNGKVKVFQGNQDSFTPVVNSLDPPLLTRYLRIHPQSWVHQIALRMEVLGCEAQDLYDKTHTCPPCPAPELLGGPSVFLFPPKPKDTLMISRTPEVTCVVVDVSHEDPEVKFNWYVDGVEVHNAKTKPREEQYNSTYRVVSVLTVLHQDWLNGKEYKCKVSNKALPAPIEKTISKAKGQPREPQVYTLPPSRDELTKNQVSLTCLVKGFYPSDIAVEWESNGQPENNYKTTPPVLDSDGSFFLYSKLTVDKSRWQQGNVFSCSVMHEALHNHYTQKSLSLSPGK

SEQ ID NO: 160 - DNA, 5937 bp, Artificial Sequence
  FVIII 283 (FVIII 169 with IHH triple mutation)
atgcaaatagagctctccacctgcttctttctgtgccttttgcgattctgctttagtgccaccagaagatactacctgggtgcagtggaactgtcatgggactatatgcaaagtgatctcggtgagctgcctgtggacgcaagatttcctcctagagtgccaaaatcttttccattcaacacctcagtcgtgtacaaaaagactctgtttgtagaattcacggatcaccttttcaacatcgctaagccaaggccaccctggatgggtctgctaggtcctaccatccaggctgaggtttatgatacagtggtcattacacttaagaacatggcttcccatcctgtcagtcttcatgctgttggtgtatcctactggaaagcttctgagggagctgaatatgatgatcagaccagtcaaagggagaaagaagatgataaagtcttccctggtggaagccatacatatgtctggcaggtcctgaaagagaatggtccaatggcctctgacccactgtgccttacctactcatatctttctcatgtggacctggtaaaagacttgaattcaggcctcattggagccctactagtatgtagagaagggagtctggccaaggaaaagacacagaccttgcacaaatttatactactttttgctgtatttgatgaagggaaaagttggcactcagaaacaaagaactccttgatgcaggatagggatgctgcatctgctcgggcctggcctaaaatgcacacagtcaatggttatgtaaacaggtctctgccaggtctgattggatgccacaggaaatcagtctattggcatgtgattggaatgggcaccactcctgaagtgcactcaatattcctcgaaggtcacacatttcttgtgaggaaccatcgccaggctagcttggaaatctcgccaataactttccttactgctcaaacactcttgatggaccttggacagtttctactgttttgtcatatctcttcccaccaacatgatggcatggaagcttatgtcaaagtagacagctgtccagaggaaccccaactacgaatgaaaaataatgaagaagcggaagactatgatgatgatcttactgattctgaaatggatgtggtcaggtttgatgatgacaactctccttcctttatccaaattcgctcagttgccaagaagcatcctaaaacttgggtacattacattgctgctgaagaggaggactgggactatgctcccttagtcctcgcccccgatgacagaagttataaaagtcaatatttgaacaatggccctcagcggattggtaggaagtacaaaaaagtccgatttatggcatacacagatgaaacctttaagactcgtgaagctattcagcatgaatcaggaatcttgggacctttactttatggggaagttggagacacactgttgattatatttaagaatcaagcaagcagaccatataacatctaccctcacggaatcactgatgtccgtcctttgtattcaaggagattaccaaaaggtgtaaaacatttgaaggattttccaattctgccaggagaaatattcaaatataaatggacagtgactgtagaagatgggccaactaaatcagatcctcggtgcctgacccgctattactctagtttcgttaatatggagagagatctagcttcaggactcattggccctctcctcatctgctacaaagaatctgtagatcaaagaggaaaccagataatgtcagacaagaggaatgtcatcctgttttctgtatttgatgagaaccgaagctggtacctcacagagaatatacaacgctttctccccaatccagctggagtgcagcttgaggatccagagttccaagcctccaacatcatgcacagcatcaatggctatgtttttgatagtttgcagttgtcagtttgtttgcatgaggtggcatactggtacattctaagcattggagcacagactgacttcctttctgtcttcttctctggatataccttcaaacacaaaatggtctatgaagacacactcaccctattcccattctcaggagaaactgtcttcatgtcgatggaaaacccaggtctatggattctggggtgccacaactcagactttcggaacagaggcatgaccgccttactgaaggtttctagttgtgacaagaacactggtgattattacgaggacagttatgaagatatttcagcatacttgctgagtaaaaacaatgccattgaaccaagaagcttctctcaaaacggcgcgccaggtacctcagagtctgctacccccgagtcagggccaggatcagagccagccacctccgggtctgagacacccgggacttccgagagtgccacccctgagtccggacccgggtccgagcccgccacttccggctccgaaactcccggcacaagcgagagcgctaccccagagtcaggaccaggaacatctacagagccctctgaaggctccgctccagggtccccagccggcagtcccactagcaccgaggagggaacctctgaaagcgccacacccgaatcagggccagggtctgagcctgctaccagcggcagcgagacaccaggcacctctgagtccgccacaccagagtccggacccggatctcccgctgggagccccacctccactgaggagggatctcctgctggctctccaacatctactgaggaaggtacctcaaccgagccatccgagggatcagctcccggcacctcagagtcggcaaccccggagtctggacccggaacttccgaaagtgccacaccagagtccggtcccgggacttcagaatcagcaacacccgagtccggccctgggtctgaacccgccacaagtggtagtgagacaccaggatcagaacctgctacctcagggtcagagacacccggatctccggcaggctcaccaacctccactgaggagggcaccagcacagaaccaagcgagggctccgcacccggaacaagcactgaacccagtgagggttcagcacccggctctgagccggccacaagtggcagtgagacacccggcacttcagagagtgccacccccgagagtggcccaggcactagtaccgagccctctgaaggcagtgcgccagcctcgagcccaccagtcttgaaacgccatcaagctgaaataactcgtactactcttcagtcagatcaagaggaaatcgattatgatgataccatatcagttgaaatgaagaaggaagattttgacatttatgatgaggatgaaaatcagagcccccgcagctttcaaaagaaaacacgacactattttattgctgcagtggagaggctctgggattatgggatgagtagctccccacatgttctaagaaacagggctcagagtggcagtgtccctcagttcaagaaagttgttttccaggaatttactgatggctcctttactcagcccttataccgtggagaactaaatgaacatttgggactcctggggccatatataagagcagaagttgaagataatatcatggtaactttcagaaatcaggcctctcgtccctattccttctattctagccttatttcttatgaggaagatcagaggcaaggagcagaacctagaaaaaactttgtcaagcctaatgaaaccaaaacttacttttggaaagtgcaacatcatatggcacccactaaagatgagtttgactgcaaagcctgggcttatttctctgatgttgacctggaaaaagatgtgcactcaggcctgattggaccccttctggtctgccacactaacacactgaaccctgctcatgggagacaagtgacagtacaggaatttgctctgtttttcaccatctttgatgagaccaaaagctggtacttcactgaaaatatggaaagaaactgcagggctccctgcaatatccagatggaagatcccacttttaaagagaattatcgcttccatgcaatcaatggctacataatggatacactacctggcttagtaatggctcaggatcaaaggattcgatggtatctgctcagcatgggcagcaatgaaaacatccattctattcatttcagtggacatgtgttcactgtacgaaaaaaagaggagtataaaatggcactgtacaatctctatccaggtgtttttgagacagtggaaatgttaccatccaaagctggaatttggcgggtggaatgccttattggcgagcatctacatgctgggatgagcacactttttctggtgtacagcaataagtgtcagactcccctgggaatggcttctggacacattagagattttcagattacagcttcaggacaatatggacagtgggccccaaagctggccagacttcattattccggatcaatcaatgcctggagcaccaaggagcccttttcttggatcaaggtggatctgttggcaccaatgattattcacggcatcaagacccagggtgcccgtcagaagttctccagcctctacatctctcagtttatcatcatgtatagtcttgatgggaagaagtggcagacttatcgaggaaattccactggaaccttaatggtcttctttggcaatgtggattcatctgggataaaacacaatatttttaaccctccaattattgctcgatacatccgtttgcacccaactcattatagcattcgcagcactcttcgcatggagttgatgggctgtgatttaaatagttgcagcatgccattgggaatggagagtaaagcaatatcagatgcacagattactgcttcatcctactttaccaatatgtttgccacctggtctccttcaaaagctcgacttcacctccaagggaggagtaatgcctggagacctcaggtgaataatccaaaagagtggctgcaagtggacttccagaagacaatgaaagtcacaggagtaactactcagggagtaaaatctctgcttaccagcatgtatgtgaaggagttcctcatctccagcagtcaagatggccatcagtggactctcttttttcagaatggcaaagtaaaggtttttcagggaaatcaagactccttcacacctgtggtgaactctctagacccaccgttactgactcgctaccttcgaattcacccccagagttgggtgcaccagattgccctgaggatggaggttctgggctgcgaggcacaggacctctacgacaaaactcacacatgcccaccgtgcccagctccagaactcctgggcggaccgtcagtcttcctcttccccccaaaacccaaggacaccctcatggcctcccggacccctgaggtcacatgcgtggtggtggacgtgagccacgaagaccctgaggtcaagttcaactggtacgtggacggcgtggaggtgcataatgccaagacaaagccgcgggaggagcagtacaacagcacgtaccgtgtggtcagcgtcctcaccgtcctggcccaggactggctgaatggcaaggagtacaagtgcaaggtctccaacaaagccctcccagcccccatcgagaaaaccatctccaaagccaaagggcagccccgagaaccacaggtgtacaccctgcccccatcccgggatgagctgaccaagaaccaggtcagcctgacctgcctggtcaaaggcttctatcccagcgacatcgccgtggagtgggagagcaatgggcagccggagaacaactacaagaccacgcctcccgtgttggactccgacggctccttcttcctctacagcaagctcaccgtggacaagagcaggtggcagcaggggaacgtcttctcatgctccgtgatgcatgaggctctgcacaacgcctacacgcagaagagcctctccctgtctccgggtaaatga

SEQ ID NO: 161 - protein, 1978 aa, Artificial Sequence
  FVIII 283 (FVIII 169 with IHH triple mutation)
MQIELSTCFFLCLLRFCFSATRRYYLGAVELSWDYMQSDLGELPVDARFPPRVPKSFPFNTSVVYKKTLFVEFTDHLFNIAKPRPPWMGLLGPTIQAEVYDTVVITLKNMASHPVSLHAVGVSYWKASEGAEYDDQTSQREKEDDKVFPGGSHTYVWQVLKENGPMASDPLCLTYSYLSHVDLVKDLNSGLIGALLVCREGSLAKEKTQTLHKFILLFAVFDEGKSWHSETKNSLMQDRDAASARAWPKMHTVNGYVNRSLPGLIGCHRKSVYWHVIGMGTTPEVHSIFLEGHTFLVRNHRQASLEISPITFLTAQTLLMDLGQFLLFCHISSHQHDGMEAYVKVDSCPEEPQLRMKNNEEAEDYDDDLTDSEMDVVRFDDDNSPSFIQIRSVAKKHPKTWVHYIAAEEEDWDYAPLVLAPDDRSYKSQYLNNGPQRIGRKYKKVRFMAYTDETFKTREAIQHESGILGPLLYGEVGDTLLIIFKNQASRPYNIYPHGITDVRPLYSRRLPKGVKHLKDFPILPGEIFKYKWTVTVEDGPTKSDPRCLTRYYSSFVNMERDLASGLIGPLLICYKESVDQRGNQIMSDKRNVILFSVFDENRSWYLTENIQRFLPNPAGVQLEDPEFQASNIMHSINGYVFDSLQLSVCLHEVAYWYILSIGAQTDFLSVFFSGYTFKHKMVYEDTLTLFPFSGETVFMSMENPGLWILGCHNSDFRNRGMTALLKVSSCDKNTGDYYEDSYEDISAYLLSKNNAIEPRSFSQNGAPGTSESATPESGPGSEPATSGSETPGTSESATPESGPGSEPATSGSETPGTSESATPESGPGTSTEPSEGSAPGSPAGSPTSTEEGTSESATPESGPGSEPATSGSETPGTSESATPESGPGSPAGSPTSTEEGSPAGSPTSTEEGTSTEPSEGSAPGTSESATPESGPGTSESATPESGPGTSESATPESGPGSEPATSGSETPGSEPATSGSETPGSPAGSPTSTEEGTSTEPSEGSAPGTSTEPSEGSAPGSEPATSGSETPGTSESATPESGPGTSTEPSEGSAPASSPPVLKRHQAEITRTTLQSDQEEIDYDDTISVEMKKEDFDIYDEDENQSPRSFQKKTRHYFIAAVERLWDYGMSSSPHVLRNRAQSGSVPQFKKVVFQEFTDGSFTQPLYRGELNEHLGLLGPYIRAEVEDNIMVTFRNQASRPYSFYSSLISYEEDQRQGAEPRKNFVKPNETKTYFWKVQHHMAPTKDEFDCKAWAYFSDVDLEKDVHSGLIGPLLVCHTNTLNPAHGRQVTVQEFALFFTIFDETKSWYFTENMERNCRAPCNIQMEDPTFKENYRFHAINGYIMDTLPGLVMAQDQRIRWYLLSMGSNENIHSIHFSGHVFTVRKKEEYKMALYNLYPGVFETVEMLPSKAGIWRVECLIGEHLHAGMSTLFLVYSNKCQTPLGMASGHIRDFQITASGQYGQWAPKLARLHYSGSINAWSTKEPFSWIKVDLLAPMIIHGIKTQGARQKFSSLYISQFIIMYSLDGKKWQTYRGNSTGTLMVFFGNVDSSGIKHNIFNPPIIARYIRLHPTHYSIRSTLRMELMGCDLNSCSMPLGMESKAISDAQITASSYFTNMFATWSPSKARLHLQGRSNAWRPQVNNPKEWLQVDFQKTMKVTGVTTQGVKSLLTSMYVKEFLISSSQDGHQWTLFFQNGKVKVFQGNQDSFTPVVNSLDPPLLTRYLRIHPQSWVHQIALRMEVLGCEAQDLYDKTHTCPPCPAPELLGGPSVFLFPPKPKDTLMASRTPEVTCVVVDVSHEDPEVKFNWYVDGVEVHNAKTKPREEQYNSTYRVVSVLTVLAQDWLNGKEYKCKVSNKALPAPIEKTISKAKGQPREPQVYTLPPSRDELTKNQVSLTCLVKGFYPSDIAVEWESNGQPENNYKTTPPVLDSDGSFFLYSKLTVDKSRWQQGNVFSCSVMHEALHNAYTQKSLSLSPGK

SEQ ID NO: 162 - DNA, 5055 bp, Artificial Sequence
  pSYNFVIII 010 (Dual chain FVIIIFc)
atgcaaatagagctctccacctgcttctttctgtgccttttgcgattctgctttagtgccaccagaagatactacctgggtgcagtggaactgtcatgggactatatgcaaagtgatctcggtgagctgcctgtggacgcaagatttcctcctagagtgccaaaatcttttccattcaacacctcagtcgtgtacaaaaagactctgtttgtagaattcacggatcaccttttcaacatcgctaagccaaggccaccctggatgggtctgctaggtcctaccatccaggctgaggtttatgatacagtggtcattacacttaagaacatggcttcccatcctgtcagtcttcatgctgttggtgtatcctactggaaagcttctgagggagctgaatatgatgatcagaccagtcaaagggagaaagaagatgataaagtcttccctggtggaagccatacatatgtctggcaggtcctgaaagagaatggtccaatggcctctgacccactgtgccttacctactcatatctttctcatgtggacctggtaaaagacttgaattcaggcctcattggagccctactagtatgtagagaagggagtctggccaaggaaaagacacagaccttgcacaaatttatactactttttgctgtatttgatgaagggaaaagttggcactcagaaacaaagaactccttgatgcaggatagggatgctgcatctgctcgggcctggcctaaaatgcacacagtcaatggttatgtaaacaggtctctgccaggtctgattggatgccacaggaaatcagtctattggcatgtgattggaatgggcaccactcctgaagtgcactcaatattcctcgaaggtcacacatttcttgtgaggaaccatcgccaggcgtccttggaaatctcgccaataactttccttactgctcaaacactcttgatggaccttggacagtttctactgttttgtcatatctcttcccaccaacatgatggcatggaagcttatgtcaaagtagacagctgtccagaggaaccccaactacgaatgaaaaataatgaagaagcggaagactatgatgatgatcttactgattctgaaatggatgtggtcaggtttgatgatgacaactctccttcctttatccaaattcgctcagttgccaagaagcatcctaaaacttgggtacattacattgctgctgaagaggaggactgggactatgctcccttagtcctcgcccccgatgacagaagttataaaagtcaatatttgaacaatggccctcagcggattggtaggaagtacaaaaaagtccgatttatggcatacacagatgaaacctttaagactcgtgaagctattcagcatgaatcaggaatcttgggacctttactttatggggaagttggagacacactgttgattatatttaagaatcaagcaagcagaccatataacatctaccctcacggaatcactgatgtccgtcctttgtattcaaggagattaccaaaaggtgtaaaacatttgaaggattttccaattctgccaggagaaatattcaaatataaatggacagtgactgtagaagatgggccaactaaatcagatcctcggtgcctgacccgctattactctagtttcgttaatatggagagagatctagcttcaggactcattggccctctcctcatctgctacaaagaatctgtagatcaaagaggaaaccagataatgtcagacaagaggaatgtcatcctgttttctgtatttgatgagaaccgaagctggtacctcacagagaatatacaacgctttctccccaatccagctggagtgcagcttgaggatccagagttccaagcctccaacatcatgcacagcatcaatggctatgtttttgatagtttgcagttgtcagtttgtttgcatgaggtggcatactggtacattctaagcattggagcacagactgacttcctttctgtcttcttctctggatataccttcaaacacaaaatggtctatgaagacacactcaccctattcccattctcaggagaaactgtcttcatgtcgatggaaaacccaggtctatggattctggggtgccacaactcagactttcggaacagaggcatgaccgccttactgaaggtttctagttgtgacaagaacactggtgattattacgaggacagttatgaagatatttcagcatacttgctgagtaaaaacaatgccattgaaccaagaagcttctctcaaaacccaccagtcttgaaacgccatcaacgggaaataactcgtactactcttcagtcagatcaagaggaaattgactatgatgataccatatcagttgaaatgaagaaggaagattttgacatttatgatgaggatgaaaatcagagcccccgcagctttcaaaagaaaacacgacactattttattgctgcagtggagaggctctgggattatgggatgagtagctccccacatgttctaagaaacagggctcagagtggcagtgtccctcagttcaagaaagttgttttccaggaatttactgatggctcctttactcagcccttataccgtggagaactaaatgaacatttgggactcctggggccatatataagagcagaagttgaagataatatcatggtaactttcagaaatcaggcctctcgtccctattccttctattctagccttatttcttatgaggaagatcagaggcaaggagcagaacctagaaaaaactttgtcaagcctaatgaaaccaaaacttacttttggaaagtgcaacatcatatggcacccactaaagatgagtttgactgcaaagcctgggcttatttctctgatgttgacctggaaaaagatgtgcactcaggcctgattggaccccttctggtctgccacactaacacactgaaccctgctcatgggagacaagtgacagtacaggaatttgctctgtttttcaccatctttgatgagaccaaaagctggtacttcactgaaaatatggaaagaaactgcagggctccctgcaatatccagatggaagatcccacttttaaagagaattatcgcttccatgcaatcaatggctacataatggatacactacctggcttagtaatggctcaggatcaaaggattcgatggtatctgctcagcatgggcagcaatgaaaacatccattctattcatttcagtggacatgtgttcactgtacgaaaaaaagaggagtataaaatggcactgtacaatctctatccaggtgtttttgagacagtggaaatgttaccatccaaagctggaatttggcgggtggaatgccttattggcgagcatctacatgctgggatgagcacactttttctggtgtacagcaataagtgtcagactcccctgggaatggcttctggacacattagagattttcagattacagcttcaggacaatatggacagtgggccccaaagctggccagacttcattattccggatcaatcaatgcctggagcaccaaggagcccttttcttggatcaaggtggatctgttggcaccaatgattattcacggcatcaagacccagggtgcccgtcagaagttctccagcctctacatctctcagtttatcatcatgtatagtcttgatgggaagaagtggcagacttatcgaggaaattccactggaaccttaatggtcttctttggcaatgtggattcatctgggataaaacacaatatttttaaccctccaattattgctcgatacatccgtttgcacccaactcattatagcattcgcagcactcttcgcatggagttgatgggctgtgatttaaatagttgcagcatgccattgggaatggagagtaaagcaatatcagatgcacagattactgcttcatcctactttaccaatatgtttgccacctggtctccttcaaaagctcgacttcacctccaagggaggagtaatgcctggagacctcaggtgaataatccaaaagagtggctgcaagtggacttccagaagacaatgaaagtcacaggagtaactactcagggagtaaaatctctgcttaccagcatgtatgtgaaggagttcctcatctccagcagtcaagatggccatcagtggactctcttttttcagaatggcaaagtaaaggtttttcagggaaatcaagactccttcacacctgtggtgaactctctagacccaccgttactgactcgctaccttcgaattcacccccagagttgggtgcaccagattgccctgaggatggaggttctgggctgcgaggcacaggacctctacgacaaaactcacacatgcccaccgtgcccagctccagaactcctgggcggaccgtcagtcttcctcttccccccaaaacccaaggacaccctcatgatctcccggacccctgaggtcacatgcgtggtggtggacgtgagccacgaagaccctgaggtcaagttcaactggtacgtggacggcgtggaggtgcataatgccaagacaaagccgcgggaggagcagtacaacagcacgtaccgtgtggtcagcgtcctcaccgtcctgcaccaggactggctgaatggcaaggagtacaagtgcaaggtctccaacaaagccctcccagcccccatcgagaaaaccatctccaaagccaaagggcagccccgagaaccacaggtgtacaccctgcccccatcccgggatgagctgaccaagaaccaggtcagcctgacctgcctggtcaaaggcttctatcccagcgacatcgccgtggagtgggagagcaatgggcagccggagaacaactacaagaccacgcctcccgtgttggactccgacggctccttcttcctctacagcaagctcaccgtggacaagagcaggtggcagcaggggaacgtcttctcatgctccgtgatgcatgaggctctgcacaaccactacacgcagaagagcctctccctgtctccgggtaaatga

SEQ ID NO: 163 - protein, 1684 aa, Artificial Sequence
  pSYNFVIII 010 (Dual chain FVIIIFc)
MQIELSTCFFLCLLRFCFSATRRYYLGAVELSWDYMQSDLGELPVDARFPPRVPKSFPFNTSVVYKKTLFVEFTDHLFNIAKPRPPWMGLLGPTIQAEVYDTVVITLKNMASHPVSLHAVGVSYWKASEGAEYDDQTSQREKEDDKVFPGGSHTYVWQVLKENGPMASDPLCLTYSYLSHVDLVKDLNSGLIGALLVCREGSLAKEKTQTLHKFILLFAVFDEGKSWHSETKNSLMQDRDAASARAWPKMHTVNGYVNRSLPGLIGCHRKSVYWHVIGMGTTPEVHSIFLEGHTFLVRNHRQASLEISPITFLTAQTLLMDLGQFLLFCHISSHQHDGMEAYVKVDSCPEEPQLRMKNNEEAEDYDDDLTDSEMDVVRFDDDNSPSFIQIRSVAKKHPKTWVHYIAAEEEDWDYAPLVLAPDDRSYKSQYLNNGPQRIGRKYKKVRFMAYTDETFKTREAIQHESGILGPLLYGEVGDTLLIIFKNQASRPYNIYPHGITDVRPLYSRRLPKGVKHLKDFPILPGEIFKYKWTVTVEDGPTKSDPRCLTRYYSSFVNMERDLASGLIGPLLICYKESVDQRGNQIMSDKRNVILFSVFDENRSWYLTENIQRFLPNPAGVQLEDPEFQASNIMHSINGYVFDSLQLSVCLHEVAYWYILSIGAQTDFLSVFFSGYTFKHKMVYEDTLTLFPFSGETVFMSMENPGLWILGCHNSDFRNRGMTALLKVSSCDKNTGDYYEDSYEDISAYLLSKNNAIEPRSFSQNPPVLKRHQREITRTTLQSDQEEIDYDDTISVEMKKEDFDIYDEDENQSPRSFQKKTRHYFIAAVERLWDYGMSSSPHVLRNRAQSGSVPQFKKVVFQEFTDGSFTQPLYRGELNEHLGLLGPYIRAEVEDNIMVTFRNQASRPYSFYSSLISYEEDQRQGAEPRKNFVKPNETKTYFWKVQHHMAPTKDEFDCKAWAYFSDVDLEKDVHSGLIGPLLVCHTNTLNPAHGRQVTVQEFALFFTIFDETKSWYFTENMERNCRAPCNIQMEDPTFKENYRFHAINGYIMDTLPGLVMAQDQRIRWYLLSMGSNENIHSIHFSGHVFTVRKKEEYKMALYNLYPGVFETVEMLPSKAGIWRVECLIGEHLHAGMSTLFLVYSNKCQTPLGMASGHIRDFQITASGQYGQWAPKLARLHYSGSINAWSTKEPFSWIKVDLLAPMIIHGIKTQGARQKFSSLYISQFIIMYSLDGKKWQTYRGNSTGTLMVFFGNVDSSGIKHNIFNPPIIARYIRLHPTHYSIRSTLRMELMGCDLNSCSMPLGMESKAISDAQITASSYFTNMFATWSPSKARLHLQGRSNAWRPQVNNPKEWLQVDFQKTMKVTGVTTQGVKSLLTSMYVKEFLISSSQDGHQWTLFFQNGKVKVFQGNQDSFTPVVNSLDPPLLTRYLRIHPQSWVHQIALRMEVLGCEAQDLYDKTHTCPPCPAPELLGGPSVFLFPPKPKDTLMISRTPEVTCVVVDVSHEDPEVKFNWYVDGVEVHNAKTKPREEQYNSTYRVVSVLTVLHQDWLNGKEYKCKVSNKALPAPIEKTISKAKGQPREPQVYTLPPSRDELTKNQVSLTCLVKGFYPSDIAVEWESNGQPENNYKTTPPVLDSDGSFFLYSKLTVDKSRWQQGNVFSCSVMHEALHNHYTQKSLSLSPGK

SEQ ID NO: 164 - protein, 6 aa, Artificial Sequence
  Linker, where the sequence can be repeated betweeen 1-10 times
SGGGGS

SEQ ID NO: 165 - protein, 20 aa, Artificial Sequence
  Linker
GGGGSGGGGSGGGGSGGGGS

SEQ ID NO: 166 - protein, 34 aa, Artificial Sequence
  Linker
SGGGGSGGGGSGGGGSGGGGSGGGGSLVPRGSGG

SEQ ID NO: 167 - protein, 314 aa, Artificial Sequence
  pSYN FVIII 169
PRSFSQNGAPGTSESATPESGPGSEPATSGSETPGTSESATPESGPGSEPATSGSETPGTSESATPESGPGTSTEPSEGSAPGSPAGSPTSTEEGTSESATPESGPGSEPATSGSETPGTSESATPESGPGSPAGSPTSTEEGSPAGSPTSTEEGTSTEPSEGSAPGTSESATPESGPGTSESATPESGPGTSESATPESGPGSEPATSGSETPGSEPATSGSETPGSPAGSPTSTEEGTSTEPSEGSAPGTSTEPSEGSAPGSEPATSGSETPGTSESATPESGPGTSTEPSEGSAPASSPPVLKRHQAEITR

SEQ ID NO: 168 - protein, 302 aa, Artificial Sequence
  pSYN FVIII 310
PRSFGAPGTSESATPESGPGSEPATSGSETPGTSESATPESGPGSEPATSGSETPGTSESATPESGPGTSTEPSEGSAPGSPAGSPTSTEEGTSESATPESGPGSEPATSGSETPGTSESATPESGPGSPAGSPTSTEEGSPAGSPTSTEEGTSTEPSEGSAPGTSESATPESGPGTSESATPESGPGTSESATPESGPGSEPATSGSETPGSEPATSGSETPGSPAGSPTSTEEGTSTEPSEGSAPGTSTEPSEGSAPGSEPATSGSETPGTSESATPESGPGTSTEPSEGSAPASSEITR

SEQ ID NO: 169 - protein, 305 aa, Artificial Sequence
  pSYN FVIII 312
PRSFSQNGAPGTSESATPESGPGSEPATSGSETPGTSESATPESGPGSEPATSGSETPGTSESATPESGPGTSTEPSEGSAPGSPAGSPTSTEEGTSESATPESGPGSEPATSGSETPGTSESATPESGPGSPAGSPTSTEEGSPAGSPTSTEEGTSTEPSEGSAPGTSESATPESGPGTSESATPESGPGTSESATPESGPGSEPATSGSETPGSEPATSGSETPGSPAGSPTSTEEGTSTEPSEGSAPGTSTEPSEGSAPGSEPATSGSETPGTSESATPESGPGTSTEPSEGSAPASSEITR

SEQ ID NO: 170 - DNA, 5892 bp, Artificial Sequence
  pSYN FVIII 310 (encoding FVIII with complete B-domain deletion except 2 amino acid residues and 288 AE-XTEN inserted after aa 742)
atgcaaatagagctctccacctgcttctttctgtgccttttgcgattctgctttagtgccaccagaagatactacctgggtgcagtggaactgtcatgggactatatgcaaagtgatctcggtgagctgcctgtggacgcaagatttcctcctagagtgccaaaatcttttccattcaacacctcagtcgtgtacaaaaagactctgtttgtagaattcacggatcaccttttcaacatcgctaagccaaggccaccctggatgggtctgctaggtcctaccatccaggctgaggtttatgatacagtggtcattacacttaagaacatggcttcccatcctgtcagtcttcatgctgttggtgtatcctactggaaagcttctgagggagctgaatatgatgatcagaccagtcaaagggagaaagaagatgataaagtcttccctggtggaagccatacatatgtctggcaggtcctgaaagagaatggtccaatggcctctgacccactgtgccttacctactcatatctttctcatgtggacctggtaaaagacttgaattcaggcctcattggagccctactagtatgtagagaagggagtctggccaaggaaaagacacagaccttgcacaaatttatactactttttgctgtatttgatgaagggaaaagttggcactcagaaacaaagaactccttgatgcaggatagggatgctgcatctgctcgggcctggcctaaaatgcacacagtcaatggttatgtaaacaggtctctgccaggtctgattggatgccacaggaaatcagtctattggcatgtgattggaatgggcaccactcctgaagtgcactcaatattcctcgaaggtcacacatttcttgtgaggaaccatcgccaggcgtccttggaaatctcgccaataactttccttactgctcaaacactcttgatggaccttggacagtttctactgttttgtcatatctcttcccaccaacatgatggcatggaagcttatgtcaaagtagacagctgtccagaggaaccccaactacgaatgaaaaataatgaagaagcggaagactatgatgatgatcttactgattctgaaatggatgtggtcaggtttgatgatgacaactctccttcctttatccaaattcgctcagttgccaagaagcatcctaaaacttgggtacattacattgctgctgaagaggaggactgggactatgctcccttagtcctcgcccccgatgacagaagttataaaagtcaatatttgaacaatggccctcagcggattggtaggaagtacaaaaaagtccgatttatggcatacacagatgaaacctttaagactcgtgaagctattcagcatgaatcaggaatcttgggacctttactttatggggaagttggagacacactgttgattatatttaagaatcaagcaagcagaccatataacatctaccctcacggaatcactgatgtccgtcctttgtattcaaggagattaccaaaaggtgtaaaacatttgaaggattttccaattctgccaggagaaatattcaaatataaatggacagtgactgtagaagatgggccaactaaatcagatcctcggtgcctgacccgctattactctagtttcgttaatatggagagagatctagcttcaggactcattggccctctcctcatctgctacaaagaatctgtagatcaaagaggaaaccagataatgtcagacaagaggaatgtcatcctgttttctgtatttgatgagaaccgaagctggtacctcacagagaatatacaacgctttctccccaatccagctggagtgcagcttgaggatccagagttccaagcctccaacatcatgcacagcatcaatggctatgtttttgatagtttgcagttgtcagtttgtttgcatgaggtggcatactggtacattctaagcattggagcacagactgacttcctttctgtcttcttctctggatataccttcaaacacaaaatggtctatgaagacacactcaccctattcccattctcaggagaaactgtcttcatgtcgatggaaaacccaggtctatggattctggggtgccacaactcagactttcggaacagaggcatgaccgccttactgaaggtttctagttgtgacaagaacactggtgattattacgaggacagttatgaagatatttcagcatacttgctgagtaaaaacaatgccattgaaccaagaagcttcggtacctcagagtctgctacccccgagtcagggccaggatcagagccagccacctccgggtctgagacacccgggacttccgagagtgccacccctgagtccggacccgggtccgagcccgccacttccggctccgaaactcccggcacaagcgagagcgctaccccagagtcaggaccaggaacatctacagagccctctgaaggctccgctccagggtccccagccggcagtcccactagcaccgaggagggaacctctgaaagcgccacacccgaatcagggccagggtctgagcctgctaccagcggcagcgagacaccaggcacctctgagtccgccacaccagagtccggacccggatctcccgctgggagccccacctccactgaggagggatctcctgctggctctccaacatctactgaggaaggtacctcaaccgagccatccgagggatcagctcccggcacctcagagtcggcaaccccggagtctggacccggaacttccgaaagtgccacaccagagtccggtcccgggacttcagaatcagcaacacccgagtccggccctgggtctgaacccgccacaagtggtagtgagacaccaggatcagaacctgctacctcagggtcagagacacccggatctccggcaggctcaccaacctccactgaggagggcaccagcacagaaccaagcgagggctccgcacccggaacaagcactgaacccagtgagggttcagcacccggctctgagccggccacaagtggcagtgagacacccggcacttcagagagtgccacccccgagagtggcccaggcactagtaccgagccctctgaaggcagtgcgccagcctcgagcgaaataactcgtactactcttcagtcagatcaagaggaaatcgattatgatgataccatatcagttgaaatgaagaaggaagattttgacatttatgatgaggatgaaaatcagagcccccgcagctttcaaaagaaaacacgacactattttattgctgcagtggagaggctctgggattatgggatgagtagctccccacatgttctaagaaacagggctcagagtggcagtgtccctcagttcaagaaagttgttttccaggaatttactgatggctcctttactcagcccttataccgtggagaactaaatgaacatttgggactcctggggccatatataagagcagaagttgaagataatatcatggtaactttcagaaatcaggcctctcgtccctattccttctattctagccttatttcttatgaggaagatcagaggcaaggagcagaacctagaaaaaactttgtcaagcctaatgaaaccaaaacttacttttggaaagtgcaacatcatatggcacccactaaagatgagtttgactgcaaagcctgggcttatttctctgatgttgacctggaaaaagatgtgcactcaggcctgattggaccccttctggtctgccacactaacacactgaaccctgctcatgggagacaagtgacagtacaggaatttgctctgtttttcaccatctttgatgagaccaaaagctggtacttcactgaaaatatggaaagaaactgcagggctccctgcaatatccagatggaagatcccacttttaaagagaattatcgcttccatgcaatcaatggctacataatggatacactacctggcttagtaatggctcaggatcaaaggattcgatggtatctgctcagcatgggcagcaatgaaaacatccattctattcatttcagtggacatgtgttcactgtacgaaaaaaagaggagtataaaatggcactgtacaatctctatccaggtgtttttgagacagtggaaatgttaccatccaaagctggaatttggcgggtggaatgccttattggcgagcatctacatgctgggatgagcacactttttctggtgtacagcaataagtgtcagactcccctgggaatggcttctggacacattagagattttcagattacagcttcaggacaatatggacagtgggccccaaagctggccagacttcattattccggatcaatcaatgcctggagcaccaaggagcccttttcttggatcaaggtggatctgttggcaccaatgattattcacggcatcaagacccagggtgcccgtcagaagttctccagcctctacatctctcagtttatcatcatgtatagtcttgatgggaagaagtggcagacttatcgaggaaattccactggaaccttaatggtcttctttggcaatgtggattcatctgggataaaacacaatatttttaaccctccaattattgctcgatacatccgtttgcacccaactcattatagcattcgcagcactcttcgcatggagttgatgggctgtgatttaaatagttgcagcatgccattgggaatggagagtaaagcaatatcagatgcacagattactgcttcatcctactttaccaatatgtttgccacctggtctccttcaaaagctcgacttcacctccaagggaggagtaatgcctggagacctcaggtgaataatccaaaagagtggctgcaagtggacttccagaagacaatgaaagtcacaggagtaactactcagggagtaaaatctctgcttaccagcatgtatgtgaaggagttcctcatctccagcagtcaagatggccatcagtggactctcttttttcagaatggcaaagtaaaggtttttcagggaaatcaagactccttcacacctgtggtgaactctctagacccaccgttactgactcgctaccttcgaattcacccccagagttgggtgcaccagattgccctgaggatggaggttctgggctgcgaggcacaggacctctacgacaaaactcacacatgcccaccgtgcccagctccagaactcctgggcggaccgtcagtcttcctcttccccccaaaacccaaggacaccctcatgatctcccggacccctgaggtcacatgcgtggtggtggacgtgagccacgaagaccctgaggtcaagttcaactggtacgtggacggcgtggaggtgcataatgccaagacaaagccgcgggaggagcagtacaacagcacgtaccgtgtggtcagcgtcctcaccgtcctgcaccaggactggctgaatggcaaggagtacaagtgcaaggtctccaacaaagccctcccagcccccatcgagaaaaccatctccaaagccaaagggcagccccgagaaccacaggtgtacaccctgcccccatcccgggatgagctgaccaagaaccaggtcagcctgacctgcctggtcaaaggcttctatcccagcgacatcgccgtggagtgggagagcaatgggcagccggagaacaactacaagaccacgcctcccgtgttggactccgacggctccttcttcctctacagcaagctcaccgtggacaagagcaggtggcagcaggggaacgtcttctcatgctccgtgatgcatgaggctctgcacaaccactacacgcagaagagcctctccctgtctccgggtaaatga

SEQ ID NO: 171 - protein, 1944 aa, Artificial Sequence
  pSYN FVIII 310 (FVIII with complete B-domain deletion except 2 amino acid residues and 288 AE-XTEN inserted after aa 742)
ATRRYYLGAVELSWDYMQSDLGELPVDARFPPRVPKSFPFNTSVVYKKTLFVEFTDHLFNIAKPRPPWMGLLGPTIQAEVYDTVVITLKNMASHPVSLHAVGVSYWKASEGAEYDDQTSQREKEDDKVFPGGSHTYVWQVLKENGPMASDPLCLTYSYLSHVDLVKDLNSGLIGALLVCREGSLAKEKTQTLHKFILLFAVFDEGKSWHSETKNSLMQDRDAASARAWPKMHTVNGYVNRSLPGLIGCHRKSVYWHVIGMGTTPEVHSIFLEGHTFLVRNHRQASLEISPITFLTAQTLLMDLGQFLLFCHISSHQHDGMEAYVKVDSCPEEPQLRMKNNEEAEDYDDDLTDSEMDVVRFDDDNSPSFIQIRSVAKKHPKTWVHYIAAEEEDWDYAPLVLAPDDRSYKSQYLNNGPQRIGRKYKKVRFMAYTDETFKTREAIQHESGILGPLLYGEVGDTLLIIFKNQASRPYNIYPHGITDVRPLYSRRLPKGVKHLKDFPILPGEIFKYKWTVTVEDGPTKSDPRCLTRYYSSFVNMERDLASGLIGPLLICYKESVDQRGNQIMSDKRNVILFSVFDENRSWYLTENIQRFLPNPAGVQLEDPEFQASNIMHSINGYVFDSLQLSVCLHEVAYWYILSIGAQTDFLSVFFSGYTFKHKMVYEDTLTLFPFSGETVFMSMENPGLWILGCHNSDFRNRGMTALLKVSSCDKNTGDYYEDSYEDISAYLLSKNNAIEPRSFGTSESATPESGPGSEPATSGSETPGTSESATPESGPGSEPATSGSETPGTSESATPESGPGTSTEPSEGSAPGSPAGSPTSTEEGTSESATPESGPGSEPATSGSETPGTSESATPESGPGSPAGSPTSTEEGSPAGSPTSTEEGTSTEPSEGSAPGTSESATPESGPGTSESATPESGPGTSESATPESGPGSEPATSGSETPGSEPATSGSETPGSPAGSPTSTEEGTSTEPSEGSAPGTSTEPSEGSAPGSEPATSGSETPGTSESATPESGPGTSTEPSEGSAPASSEITRTTLQSDQEEIDYDDTISVEMKKEDFDIYDEDENQSPRSFQKKTRHYFIAAVERLWDYGMSSSPHVLRNRAQSGSVPQFKKVVFQEFTDGSFTQPLYRGELNEHLGLLGPYIRAEVEDNIMVTFRNQASRPYSFYSSLISYEEDQRQGAEPRKNFVKPNETKTYFWKVQHHMAPTKDEFDCKAWAYFSDVDLEKDVHSGLIGPLLVCHTNTLNPAHGRQVTVQEFALFFTIFDETKSWYFTENMERNCRAPCNIQMEDPTFKENYRFHAINGYIMDTLPGLVMAQDQRIRWYLLSMGSNENIHSIHFSGHVFTVRKKEEYKMALYNLYPGVFETVEMLPSKAGIWRVECLIGEHLHAGMSTLFLVYSNKCQTPLGMASGHIRDFQITASGQYGQWAPKLARLHYSGSINAWSTKEPFSWIKVDLLAPMIIHGIKTQGARQKFSSLYISQFIIMYSLDGKKWQTYRGNSTGTLMVFFGNVDSSGIKHNIFNPPIIARYIRLHPTHYSIRSTLRMELMGCDLNSCSMPLGMESKAISDAQITASSYFTNMFATWSPSKARLHLQGRSNAWRPQVNNPKEWLQVDFQKTMKVTGVTTQGVKSLLTSMYVKEFLISSSQDGHQWTLFFQNGKVKVFQGNQDSFTPVVNSLDPPLLTRYLRIHPQSWVHQIALRMEVLGCEAQDLYDKTHTCPPCPAPELLGGPSVFLFPPKPKDTLMISRTPEVTCVVVDVSHEDPEVKFNWYVDGVEVHNAKTKPREEQYNSTYRVVSVLTVLHQDWLNGKEYKCKVSNKALPAPIEKTISKAKGQPREPQVYTLPPSRDELTKNQVSLTCLVKGFYPSDIAVEWESNGQPENNYKTTPPVLDSDGSFFLYSKLTVDKSRWQQGNVFSCSVMHEALHNHYTQKSLSLSPGK

SEQ ID NO: 172 - DNA, 5900 bp, Artificial Sequence
  pSYN FVIII 312 (FVIII with complete B-domain deletion except 5 amino acid residues and 288 AE-XTEN inserted after aa 745- FVIII B5 version)
atgcaaatagagctctccacctgcttctttctgtgccttttgcgattctgctttagtgccaccagaagatactacctgggtgcagtggaactgtcatgggactatatgcaaagtgatctcggtgagctgcctgtggacgcaagatttcctcctagagtgccaaaatcttttccattcaacacctcagtcgtgtacaaaaagactctgtttgtagaattcacggatcaccttttcaacatcgctaagccaaggccaccctggatgggtctgctaggtcctaccatccaggctgaggtttatgatacagtggtcattacacttaagaacatggcttcccatcctgtcagtcttcatgctgttggtgtatcctactggaaagcttctgagggagctgaatatgatgatcagaccagtcaaagggagaaagaagatgataaagtcttccctggtggaagccatacatatgtctggcaggtcctgaaagagaatggtccaatggcctctgacccactgtgccttacctactcatatctttctcatgtggacctggtaaaagacttgaattcaggcctcattggagccctactagtatgtagagaagggagtctggccaaggaaaagacacagaccttgcacaaatttatactactttttgctgtatttgatgaagggaaaagttggcactcagaaacaaagaactccttgatgcaggatagggatgctgcatctgctcgggcctggcctaaaatgcacacagtcaatggttatgtaaacaggtctctgccaggtctgattggatgccacaggaaatcagtctattggcatgtgattggaatgggcaccactcctgaagtgcactcaatattcctcgaaggtcacacatttcttgtgaggaaccatcgccaggcgtccttggaaatctcgccaataactttccttactgctcaaacactcttgatggaccttggacagtttctactgttttgtcatatctcttcccaccaacatgatggcatggaagcttatgtcaaagtagacagctgtccagaggaaccccaactacgaatgaaaaataatgaagaagcggaagactatgatgatgatcttactgattctgaaatggatgtggtcaggtttgatgatgacaactctccttcctttatccaaattcgctcagttgccaagaagcatcctaaaacttgggtacattacattgctgctgaagaggaggactgggactatgctcccttagtcctcgcccccgatgacagaagttataaaagtcaatatttgaacaatggccctcagcggattggtaggaagtacaaaaaagtccgatttatggcatacacagatgaaacctttaagactcgtgaagctattcagcatgaatcaggaatcttgggacctttactttatggggaagttggagacacactgttgattatatttaagaatcaagcaagcagaccatataacatctaccctcacggaatcactgatgtccgtcctttgtattcaaggagattaccaaaaggtgtaaaacatttgaaggattttccaattctgccaggagaaatattcaaatataaatggacagtgactgtagaagatgggccaactaaatcagatcctcggtgcctgacccgctattactctagtttcgttaatatggagagagatctagcttcaggactcattggccctctcctcatctgctacaaagaatctgtagatcaaagaggaaaccagataatgtcagacaagaggaatgtcatcctgttttctgtatttgatgagaaccgaagctggtacctcacagagaatatacaacgctttctccccaatccagctggagtgcagcttgaggatccagagttccaagcctccaacatcatgcacagcatcaatggctatgtttttgatagtttgcagttgtcagtttgtttgcatgaggtggcatactggtacattctaagcattggagcacagactgacttcctttctgtcttcttctctggatataccttcaaacacaaaatggtctatgaagacacactcaccctattcccattctcaggagaaactgtcttcatgtcgatggaaaacccaggtctatggattctggggtgccacaactcagactttcggaacagaggcatgaccgccttactgaaggtttctagttgtgacaagaacactggtgattattacgaggacagttatgaagatatttcagcatacttgctgagtaaaaacaatgccattgaaccaagaagcttctctcaaaacggtacctcagagtctgctacccccgagtcagggccaggatcagagccagccacctccgggtctgagacacccgggacttccgagagtgccacccctgagtccggacccgggtccgagcccgccacttccggctccgaaactcccggcacaagcgagagcgctaccccagagtcaggaccaggaacatctacagagccctctgaaggctccgctccagggtccccagccggcagtcccactagcaccgaggagggaacctctgaaagcgccacacccgaatcagggccagggtctgagcctgctaccagcggcagcgagacaccaggcacctctgagtccgccacaccagagtccggacccggatctcccgctgggagccccacctccactgaggagggatctcctgctggctctccaacatctactgaggaaggtacctcaaccgagccatccgagggatcagctcccggcacctcagagtcggcaaccccggagtctggacccggaacttccgaaagtgccacaccagagtccggtcccgggacttcagaatcagcaacacccgagtccggccctgggtctgaacccgccacaagtggtagtgagacaccaggatcagaacctgctacctcagggtcagagacacccggatctccggcaggctcaccaacctccactgaggagggcaccagcacagaaccaagcgagggctccgcacccggaacaagcactgaacccagtgagggttcagcacccggctctgagccggccacaagtggcagtgagacacccggcacttcagagagtgccacccccgagagtggcccaggcactagtaccgagccctctgaaggcagtgcgccagcctcgagcgaaataactcgtactactcttcagtcagatcaagaggaaatcgattatgatgataccatatcagttgaaatgaagaaggaagattttgacatttatgatgaggatgaaaatcagagcccccgcagctttcaaaagaaaacacgacactattttattgctgcagtggagaggctctgggattatgggatgagtagctccccacatgttctaagaaacagggctcagagtggcagtgtccctcagttcaagaaagttgttttccaggaatttactgatggctcctttactcagcccttataccgtggagaactaaatgaacatttgggactcctggggccatatataagagcagaagttgaagataatatcatggtaactttcagaaatcaggcctctcgtccctattccttctattctagccttatttcttatgaggaagatcagaggcaaggagcagaacctagaaaaaactttgtcaagcctaatgaaaccaaaacttacttttggaaagtgcaacatcatatggcacccactaaagatgagtttgactgcaaagcctgggcttatttctctgatgttgacctggaaaaagatgtgcactcaggcctgattggaccccttctggtctgccacactaacacactgaaccctgctcatgggagacaagtgacagtacaggaatttgctctgtttttcaccatctttgatgagaccaaaagctggtacttcactgaaaatatggaaagaaactgcagggctccctgcaatatccagatggaagatcccacttttaaagagaattatcgcttccatgcaatcaatggctacataatggatacactacctggcttagtaatggctcaggatcaaaggattcgatggtatctgctcagcatgggcagcaatgaaaacatccattctattcatttcagtggacatgtgttcactgtacgaaaaaaagaggagtataaaatggcactgtacaatctctatccaggtgtttttgagacagtggaaatgttaccatccaaagctggaatttggcgggtggaatgccttattggcgagcatctacatgctgggatgagcacactttttctggtgtacagcaataagtgtcagactcccctgggaatggcttctggacacattagagattttcagattacagcttcaggacaatatggacagtgggccccaaagctggccagacttcattattccggatcaatcaatgcctggagcaccaaggagcccttttcttggatcaaggtggatctgttggcaccaatgattattcacggcatcaagacccagggtgcccgtcagaagttctccagcctctacatctctcagtttatcatcatgtatagtcttgatgggaagaagtggcagacttatcgaggaaattccactggaaccttaatggtcttctttggcaatgtggattcatctgggataaaacacaatatttttaaccctccaattattgctcgatacatccgtttgcacccaactcattatagcattcgcagcactcttcgcatggagttgatgggctgtgatttaaatagttgcagcatgccattgggaatggagagtaaagcaatatcagatgcacagattactgcttcatcctactttaccaatatgtttgccacctggtctccttcaaaagctcgacttcacctccaagggaggagtaatgcctggagacctcaggtgaataatccaaaagagtggctgcaagtggacttccagaagacaatgaaagtcacaggagtaactactcagggagtaaaatctctgcttaccagcatgtatgtgaaggagttcctcatctccagcagtcaagatggccatcagtggactctcttttttcagaatggcaaagtaaaggtttttcagggaaatcaagactccttcacacctgtggtgaactctctagacccaccgttactgactcgctaccttcgaattcacccccagagttgggtgcaccagattgccctgaggatggaggttctgggctgcgaggcacaggacctctacgacaaaactcacacatgcccaccgtgcccagctccagaactcctgggcggaccgtcagtcttcctcttccccccaaaacccaaggacaccctcatgatctcccggacccctgaggtcacatgcgtggtggtggacgtgagccacgaagaccctgaggtcaagttcaactggtacgtggacggcgtggaggtgcataatgccaagacaaagccgcgggaggagcagtacaacagcacgtaccgtgtggtcagcgtcctcaccgtcctgcaccaggactggctgaatggcaaggagtacaagtgcaaggtctccaacaaagccctcccagcccccatcgagaaaaccatctccaaagccaaagggcagccccgagaaccacaggtgtacaccctgcccccatcccgggatgagctgaccaagaaccaggtcagcctgacctgcctggtcaaaggcttctatcccagcgacatcgccgtggagtgggagagcaatgggcagccggagaacaactacaagaccacgcctcccgtgttggactccgacggctccttcttcctctacagcaagctcaccgtggacaagagcaggtggcagcaggggaacgtcttctcatgctccgtgatgcatgaggctctgcacaaccactacacgcagaagagcctctccctgtctccgggtaaatg

SEQ ID NO: 173 - protein, 1947 aa, Artificial Sequence
  pSYN FVIII 312 (FVIII with complete B-domain deletion except 5 amino acid residues and 288 AE-XTEN inserted after aa 745- FVIII B5 version)
ATRRYYLGAVELSWDYMQSDLGELPVDARFPPRVPKSFPFNTSVVYKKTLFVEFTDHLFNIAKPRPPWMGLLGPTIQAEVYDTVVITLKNMASHPVSLHAVGVSYWKASEGAEYDDQTSQREKEDDKVFPGGSHTYVWQVLKENGPMASDPLCLTYSYLSHVDLVKDLNSGLIGALLVCREGSLAKEKTQTLHKFILLFAVFDEGKSWHSETKNSLMQDRDAASARAWPKMHTVNGYVNRSLPGLIGCHRKSVYWHVIGMGTTPEVHSIFLEGHTFLVRNHRQASLEISPITFLTAQTLLMDLGQFLLFCHISSHQHDGMEAYVKVDSCPEEPQLRMKNNEEAEDYDDDLTDSEMDVVRFDDDNSPSFIQIRSVAKKHPKTWVHYIAAEEEDWDYAPLVLAPDDRSYKSQYLNNGPQRIGRKYKKVRFMAYTDETFKTREAIQHESGILGPLLYGEVGDTLLIIFKNQASRPYNIYPHGITDVRPLYSRRLPKGVKHLKDFPILPGEIFKYKWTVTVEDGPTKSDPRCLTRYYSSFVNMERDLASGLIGPLLICYKESVDQRGNQIMSDKRNVILFSVFDENRSWYLTENIQRFLPNPAGVQLEDPEFQASNIMHSINGYVFDSLQLSVCLHEVAYWYILSIGAQTDFLSVFFSGYTFKHKMVYEDTLTLFPFSGETVFMSMENPGLWILGCHNSDFRNRGMTALLKVSSCDKNTGDYYEDSYEDISAYLLSKNNAIEPRSFSQNGTSESATPESGPGSEPATSGSETPGTSESATPESGPGSEPATSGSETPGTSESATPESGPGTSTEPSEGSAPGSPAGSPTSTEEGTSESATPESGPGSEPATSGSETPGTSESATPESGPGSPAGSPTSTEEGSPAGSPTSTEEGTSTEPSEGSAPGTSESATPESGPGTSESATPESGPGTSESATPESGPGSEPATSGSETPGSEPATSGSETPGSPAGSPTSTEEGTSTEPSEGSAPGTSTEPSEGSAPGSEPATSGSETPGTSESATPESGPGTSTEPSEGSAPASSEITRTTLQSDQEEIDYDDTISVEMKKEDFDIYDEDENQSPRSFQKKTRHYFIAAVERLWDYGMSSSPHVLRNRAQSGSVPQFKKVVFQEFTDGSFTQPLYRGELNEHLGLLGPYIRAEVEDNIMVTFRNQASRPYSFYSSLISYEEDQRQGAEPRKNFVKPNETKTYFWKVQHHMAPTKDEFDCKAWAYFSDVDLEKDVHSGLIGPLLVCHTNTLNPAHGRQVTVQEFALFFTIFDETKSWYFTENMERNCRAPCNIQMEDPTFKENYRFHAINGYIMDTLPGLVMAQDQRIRWYLLSMGSNENIHSIHFSGHVFTVRKKEEYKMALYNLYPGVFETVEMLPSKAGIWRVECLIGEHLHAGMSTLFLVYSNKCQTPLGMASGHIRDFQITASGQYGQWAPKLARLHYSGSINAWSTKEPFSWIKVDLLAPMIIHGIKTQGARQKFSSLYISQFIIMYSLDGKKWQTYRGNSTGTLMVFFGNVDSSGIKHNIFNPPIIARYIRLHPTHYSIRSTLRMELMGCDLNSCSMPLGMESKAISDAQITASSYFTNMFATWSPSKARLHLQGRSNAWRPQVNNPKEWLQVDFQKTMKVTGVTTQGVKSLLTSMYVKEFLISSSQDGHQWTLFFQNGKVKVFQGNQDSFTPVVNSLDPPLLTRYLRIHPQSWVHQIALRMEVLGCEAQDLYDKTHTCPPCPAPELLGGPSVFLFPPKPKDTLMISRTPEVTCVVVDVSHEDPEVKFNWYVDGVEVHNAKTKPREEQYNSTYRVVSVLTVLHQDWLNGKEYKCKVSNKALPAPIEKTISKAKGQPREPQVYTLPPSRDELTKNQVSLTCLVKGFYPSDIAVEWESNGQPENNYKTTPPVLDSDGSFFLYSKLTVDKSRWQQGNVFSCSVMHEALHNHYTQKSLSLSPGK

SEQ ID NO: 174 - DNA, 4977 bp, Artificial Sequence
  pSYN VWF073 (VWFD1D2D'D3- 144 AE XTEN- FVIII truncated a2 thrombin site-Fc)
atgattcctgccagatttgccggggtgctgcttgctctggccctcattttgccagggaccctttgtgcagaaggaactcgcggcaggtcatccacggcccgatgcagccttttcggaagtgacttcgtcaacacctttgatgggagcatgtacagctttgcgggatactgcagttacctcctggcagggggctgccagaaacgctccttctcgattattggggacttccagaatggcaagagagtgagcctctccgtgtatcttggggaattttttgacatccatttgtttgtcaatggtaccgtgacacagggggaccaaagagtctccatgccctatgcctccaaagggctgtatctagaaactgaggctgggtactacaagctgtccggtgaggcctatggctttgtggccaggatcgatggcagcggcaactttcaagtcctgctgtcagacagatacttcaacaagacctgcgggctgtgtggcaactttaacatctttgctgaagatgactttatgacccaagaagggaccttgacctcggacccttatgactttgccaactcatgggctctgagcagtggagaacagtggtgtgaacgggcatctcctcccagcagctcatgcaacatctcctctggggaaatgcagaagggcctgtgggagcagtgccagcttctgaagagcacctcggtgtttgcccgctgccaccctctggtggaccccgagccttttgtggccctgtgtgagaagactttgtgtgagtgtgctggggggctggagtgcgcctgccctgccctcctggagtacgcccggacctgtgcccaggagggaatggtgctgtacggctggaccgaccacagcgcgtgcagcccagtgtgccctgctggtatggagtataggcagtgtgtgtccccttgcgccaggacctgccagagcctgcacatcaatgaaatgtgtcaggagcgatgcgtggatggctgcagctgccctgagggacagctcctggatgaaggcctctgcgtggagagcaccgagtgtccctgcgtgcattccggaaagcgctaccctcccggcacctccctctctcgagactgcaacacctgcatttgccgaaacagccagtggatctgcagcaatgaagaatgtccaggggagtgccttgtcactggtcaatcccacttcaagagctttgacaacagatacttcaccttcagtgggatctgccagtacctgctggcccgggattgccaggaccactccttctccattgtcattgagactgtccagtgtgctgatgaccgcgacgctgtgtgcacccgctccgtcaccgtccggctgcctggcctgcacaacagccttgtgaaactgaagcatggggcaggagttgccatggatggccaggacatccagctccccctcctgaaaggtgacctccgcatccagcatacagtgacggcctccgtgcgcctcagctacggggaggacctgcagatggactgggatggccgcgggaggctgctggtgaagctgtcccccgtctatgccgggaagacctgcggcctgtgtgggaattacaatggcaaccagggcgacgacttccttaccccctctgggctggcggagccccgggtggaggacttcgggaacgcctggaagctgcacggggactgccaggacctgcagaagcagcacagcgatccctgcgccctcaacccgcgcatgaccaggttctccgaggaggcgtgcgcggtcctgacgtcccccacattcgaggcctgccatcgtgccgtcagcccgctgccctacctgcggaactgccgctacgacgtgtgctcctgctcggacggccgcgagtgcctgtgcggcgccctggccagctatgccgcggcctgcgcggggagaggcgtgcgcgtcgcgtggcgcgagccaggccgctgtgagctgaactgcccgaaaggccaggtgtacctgcagtgcgggaccccctgcaacctgacctgccgctctctctcttacccggatgaggaatgcaatgaggcctgcctggagggctgcttctgccccccagggctctacatggatgagaggggggactgcgtgcccaaggcccagtgcccctgttactatgacggtgagatcttccagccagaagacatcttctcagaccatcacaccatgtgctactgtgaggatggcttcatgcactgtaccatgagtggagtccccggaagcttgctgcctgacgctgtcctcagcagtcccctgtctcatcgcagcaaaaggagcctatcctgtcggccccccatggtcaagctggtgtgtcccgctgacaacctgcgggctgaagggctcgagtgtaccaaaacgtgccagaactatgacctggagtgcatgagcatgggctgtgtctctggctgcctctgccccccgggcatggtccggcatgagaacagatgtgtggccctggaaaggtgtccctgcttccatcagggcaaggagtatgcccctggagaaacagtgaagattggctgcaacacttgtgtctgtcgggaccggaagtggaactgcacagaccatgtgtgtgatgccacgtgctccacgatcggcatggcccactacctcaccttcgacgggctcaaatacctgttccccggggagtgccagtacgttctggtgcaggattactgcggcagtaaccctgggacctttcggatcctagtggggaataagggatgcagccacccctcagtgaaatgcaagaaacgggtcaccatcctggtggagggaggagagattgagctgtttgacggggaggtgaatgtgaagaggcccatgaaggatgagactcactttgaggtggtggagtctggccggtacatcattctgctgctgggcaaagccctctccgtggtctgggaccgccacctgagcatctccgtggtcctgaagcagacataccaggagaaagtgtgtggcctgtgtgggaattttgatggcatccagaacaatgacctcaccagcagcaacctccaagtggaggaagaccctgtggactttgggaactcctggaaagtgagctcgcagtgtgctgacaccagaaaagtgcctctggactcatcccctgccacctgccataacaacatcatgaagcagacgatggtggattcctcctgtagaatccttaccagtgacgtcttccaggactgcaacaagctggtggaccccgagccatatctggatgtctgcatttacgacacctgctcctgtgagtccattggggactgcgccgcattctgcgacaccattgctgcctatgcccacgtgtgtgcccagcatggcaaggtggtgacctggaggacggccacattgtgcccccagagctgcgaggagaggaatctccgggagaacgggtatgaggctgagtggcgctataacagctgtgcacctgcctgtcaagtcacgtgtcagcaccctgagccactggcctgccctgtgcagtgtgtggagggctgccatgcccactgccctccagggaaaatcctggatgagcttttgcagacctgcgttgaccctgaagactgtccagtgtgtgaggtggctggccggcgttttgcctcaggaaagaaagtcaccttgaatcccagtgaccctgagcactgccagatttgccactgtgatgttgtcaacctcacctgtgaagcctgccaggagccgggcgcgccaacatcagagagcgccacccctgaaagtggtcccgggagcgagccagccacatctgggtcggaaacgccaggcacaagtgagtctgcaactcccgagtccggacctggctccgagcctgccactagcggctccgagactccgggaacttccgagagcgctacaccagaaagcggacccggaaccagtaccgaacctagcgagggctctgctccgggcagcccagccggctctcctacatccacggaggagggcacttccgaatccgccaccccggagtcagggccaggatctgaacccgctacctcaggcagtgagacgccaggaacgagcgagtccgctacaccggagagtgggccagggagccctgctggatctcctacgtccactgaggaagggtcaccagcgggctcgcccaccagcactgaagaaggtgcctcgagcggcggtggaggatccggtggcgggggatccggtggcgggggatccggtggcgggggatccggtggcgggggatccggtggcgggggatccattgaaccaagaagcttctctggcagcggaggcgacaaaactcacacatgcccaccgtgcccagctccagaactcctgggcggaccgtcagtcttcctcttccccccaaaacccaaggacaccctcatgatctcccggacccctgaggtcacatgcgtggtggtggacgtgagccacgaagaccctgaggtcaagttcaactggtacgtggacggcgtggaggtgcataatgccaagacaaagccgcgggaggagcagtacaacagcacgtaccgtgtggtcagcgtcctcaccgtcctgcaccaggactggctgaatggcaaggagtacaagtgcaaggtctccaacaaagccctcccagcccccatcgagaaaaccatctccaaagccaaagggcagccccgagaaccacaggtgtacaccctgcccccatcccgggatgagctgaccaagaaccaggtcagcctgacctgcctggtcaaaggcttctatcccagcgacatcgccgtggagtgggagagcaatgggcagccggagaacaactacaagaccacgcctcccgtgttggactccgacggctccttcttcctctacagcaagctcaccgtggacaagagcaggtggcagcaggggaacgtcttctcatgctccgtgatgcatgaggctctgcacaaccactacacgcagaagagcctctccctgtctccgggtaaatga

SEQ ID NO: 175 - protein, 1658 aa, Artificial Sequence
  pSYN VWF073 (VWFD1D2D'D3- 144 AE XTEN- truncated a2 thrombin site-Fc)
MIPARFAGVLLALALILPGTLCAEGTRGRSSTARCSLFGSDFVNTFDGSMYSFAGYCSYLLAGGCQKRSFSIIGDFQNGKRVSLSVYLGEFFDIHLFVNGTVTQGDQRVSMPYASKGLYLETEAGYYKLSGEAYGFVARIDGSGNFQVLLSDRYFNKTCGLCGNFNIFAEDDFMTQEGTLTSDPYDFANSWALSSGEQWCERASPPSSSCNISSGEMQKGLWEQCQLLKSTSVFARCHPLVDPEPFVALCEKTLCECAGGLECACPALLEYARTCAQEGMVLYGWTDHSACSPVCPAGMEYRQCVSPCARTCQSLHINEMCQERCVDGCSCPEGQLLDEGLCVESTECPCVHSGKRYPPGTSLSRDCNTCICRNSQWICSNEECPGECLVTGQSHFKSFDNRYFTFSGICQYLLARDCQDHSFSIVIETVQCADDRDAVCTRSVTVRLPGLHNSLVKLKHGAGVAMDGQDIQLPLLKGDLRIQHTVTASVRLSYGEDLQMDWDGRGRLLVKLSPVYAGKTCGLCGNYNGNQGDDFLTPSGLAEPRVEDFGNAWKLHGDCQDLQKQHSDPCALNPRMTRFSEEACAVLTSPTFEACHRAVSPLPYLRNCRYDVCSCSDGRECLCGALASYAAACAGRGVRVAWREPGRCELNCPKGQVYLQCGTPCNLTCRSLSYPDEECNEACLEGCFCPPGLYMDERGDCVPKAQCPCYYDGEIFQPEDIFSDHHTMCYCEDGFMHCTMSGVPGSLLPDAVLSSPLSHRSKRSLSCRPPMVKLVCPADNLRAEGLECTKTCQNYDLECMSMGCVSGCLCPPGMVRHENRCVALERCPCFHQGKEYAPGETVKIGCNTCVCRDRKWNCTDHVCDATCSTIGMAHYLTFDGLKYLFPGECQYVLVQDYCGSNPGTFRILVGNKGCSHPSVKCKKRVTILVEGGEIELFDGEVNVKRPMKDETHFEVVESGRYIILLLGKALSVVWDRHLSISVVLKQTYQEKVCGLCGNFDGIQNNDLTSSNLQVEEDPVDFGNSWKVSSQCADTRKVPLDSSPATCHNNIMKQTMVDSSCRILTSDVFQDCNKLVDPEPYLDVCIYDTCSCESIGDCAAFCDTIAAYAHVCAQHGKVVTWRTATLCPQSCEERNLRENGYEAEWRYNSCAPACQVTCQHPEPLACPVQCVEGCHAHCPPGKILDELLQTCVDPEDCPVCEVAGRRFASGKKVTLNPSDPEHCQICHCDVVNLTCEACQEPGAPTSESATPESGPGSEPATSGSETPGTSESATPESGPGSEPATSGSETPGTSESATPESGPGTSTEPSEGSAPGSPAGSPTSTEEGTSESATPESGPGSEPATSGSETPGTSESATPESGPGSPAGSPTSTEEGSPAGSPTSTEEGASSGGGGSGGGGSGGGGSGGGGSGGGGSGGGGSIEPRSFSGSGGDKTHTCPPCPAPELLGGPSVFLFPPKPKDTLMISRTPEVTCVVVDVSHEDPEVKFNWYVDGVEVHNAKTKPREEQYNSTYRVVSVLTVLHQDWLNGKEYKCKVSNKALPAPIEKTISKAKGQPREPQVYTLPPSRDELTKNQVSLTCLVKGFYPSDIAVEWESNGQPENNYKTTPPVLDSDGSFFLYSKLTVDKSRWQQGNVFSCSVMHEALHNHYTQKSLSLSPGK

SEQ ID NO: 176 - protein, 25 aa, Artificial Sequence
  Cleavable linker
YEDSYEDISAYLLSKNNAIEPRSFS

SEQ ID NO: 177 - protein, 24 aa, Artificial Sequence
  Cleavable linker
EDSYEDISAYLLSKNNAIEPRSFS

SEQ ID NO: 178 - protein, 23 aa, Artificial Sequence
  Cleavable linker
DSYEDISAYLLSKNNAIEPRSFS

SEQ ID NO: 179 - protein, 22 aa, Artificial Sequence
  Cleavable linker
SYEDISAYLLSKNNAIEPRSFS

SEQ ID NO: 180 - protein, 21 aa, Artificial Sequence
  Cleavable linker
YEDISAYLLSKNNAIEPRSFS

SEQ ID NO: 181 - protein, 20 aa, Artificial Sequence
  Cleavable linker
EDISAYLLSKNNAIEPRSFS

SEQ ID NO: 182 - protein, 19 aa, Artificial Sequence
  Cleavable linker
DISAYLLSKNNAIEPRSFS

SEQ ID NO: 183 - protein, 18 aa, Artificial Sequence
  Cleavable linker
ISAYLLSKNNAIEPRSFS

SEQ ID NO: 184 - protein, 17 aa, Artificial Sequence
  Cleavable linker
SAYLLSKNNAIEPRSFS

SEQ ID NO: 185 - protein, 16 aa, Artificial Sequence
  Cleavable linker
AYLLSKNNAIEPRSFS

SEQ ID NO: 186 - protein, 15 aa, Artificial Sequence
  Cleavable linker
YLLSKNNAIEPRSFS

SEQ ID NO: 187 - protein, 14 aa, Artificial Sequence
  Cleavable linker
LLSKNNAIEPRSFS

SEQ ID NO: 188 - protein, 13 aa, Artificial Sequence
  Cleavable linker
LSKNNAIEPRSFS

SEQ ID NO: 189 - protein, 12 aa, Artificial Sequence
  Cleavable linker
SKNNAIEPRSFS

SEQ ID NO: 190 - protein, 11 aa, Artificial Sequence
  Cleavable linker
KNNAIEPRSFS

SEQ ID NO: 191 - protein, 10 aa, Artificial Sequence
  Cleavable linker
NNAIEPRSFS

SEQ ID NO: 192 - protein, 9 aa, Artificial Sequence
  Cleavable linker
NAIEPRSFS

SEQ ID NO: 193 - protein, 8 aa, Artificial Sequence
  Cleavable linker
AIEPRSFS

SEQ ID NO: 194 - protein, 7 aa, Artificial Sequence
  Cleavable linker
IEPRSFS

SEQ ID NO: 195 - protein, 6 aa, Artificial Sequence
  Cleavable linker
EPRSFS

SEQ ID NO: 196 - DNA, 4959 bp, Artificial Sequence
  pSYN VWF059 (VWF D'D3-Fc with acidic region 2 (a2) thrombin site in the linker)
atgattcctgccagatttgccggggtgctgcttgctctggccctcattttgccagggaccctttgtgcagaaggaactcgcggcaggtcatccacggcccgatgcagccttttcggaagtgacttcgtcaacacctttgatgggagcatgtacagctttgcgggatactgcagttacctcctggcagggggctgccagaaacgctccttctcgattattggggacttccagaatggcaagagagtgagcctctccgtgtatcttggggaattttttgacatccatttgtttgtcaatggtaccgtgacacagggggaccaaagagtctccatgccctatgcctccaaagggctgtatctagaaactgaggctgggtactacaagctgtccggtgaggcctatggctttgtggccaggatcgatggcagcggcaactttcaagtcctgctgtcagacagatacttcaacaagacctgcgggctgtgtggcaactttaacatctttgctgaagatgactttatgacccaagaagggaccttgacctcggacccttatgactttgccaactcatgggctctgagcagtggagaacagtggtgtgaacgggcatctcctcccagcagctcatgcaacatctcctctggggaaatgcagaagggcctgtgggagcagtgccagcttctgaagagcacctcggtgtttgcccgctgccaccctctggtggaccccgagccttttgtggccctgtgtgagaagactttgtgtgagtgtgctggggggctggagtgcgcctgccctgccctcctggagtacgcccggacctgtgcccaggagggaatggtgctgtacggctggaccgaccacagcgcgtgcagcccagtgtgccctgctggtatggagtataggcagtgtgtgtccccttgcgccaggacctgccagagcctgcacatcaatgaaatgtgtcaggagcgatgcgtggatggctgcagctgccctgagggacagctcctggatgaaggcctctgcgtggagagcaccgagtgtccctgcgtgcattccggaaagcgctaccctcccggcacctccctctctcgagactgcaacacctgcatttgccgaaacagccagtggatctgcagcaatgaagaatgtccaggggagtgccttgtcactggtcaatcccacttcaagagctttgacaacagatacttcaccttcagtgggatctgccagtacctgctggcccgggattgccaggaccactccttctccattgtcattgagactgtccagtgtgctgatgaccgcgacgctgtgtgcacccgctccgtcaccgtccggctgcctggcctgcacaacagccttgtgaaactgaagcatggggcaggagttgccatggatggccaggacatccagctccccctcctgaaaggtgacctccgcatccagcatacagtgacggcctccgtgcgcctcagctacggggaggacctgcagatggactgggatggccgcgggaggctgctggtgaagctgtcccccgtctatgccgggaagacctgcggcctgtgtgggaattacaatggcaaccagggcgacgacttccttaccccctctgggctggcggagccccgggtggaggacttcgggaacgcctggaagctgcacggggactgccaggacctgcagaagcagcacagcgatccctgcgccctcaacccgcgcatgaccaggttctccgaggaggcgtgcgcggtcctgacgtcccccacattcgaggcctgccatcgtgccgtcagcccgctgccctacctgcggaactgccgctacgacgtgtgctcctgctcggacggccgcgagtgcctgtgcggcgccctggccagctatgccgcggcctgcgcggggagaggcgtgcgcgtcgcgtggcgcgagccaggccgctgtgagctgaactgcccgaaaggccaggtgtacctgcagtgcgggaccccctgcaacctgacctgccgctctctctcttacccggatgaggaatgcaatgaggcctgcctggagggctgcttctgccccccagggctctacatggatgagaggggggactgcgtgcccaaggcccagtgcccctgttactatgacggtgagatcttccagccagaagacatcttctcagaccatcacaccatgtgctactgtgaggatggcttcatgcactgtaccatgagtggagtccccggaagcttgctgcctgacgctgtcctcagcagtcccctgtctcatcgcagcaaaaggagcctatcctgtcggccccccatggtcaagctggtgtgtcccgctgacaacctgcgggctgaagggctcgagtgtaccaaaacgtgccagaactatgacctggagtgcatgagcatgggctgtgtctctggctgcctctgccccccgggcatggtccggcatgagaacagatgtgtggccctggaaaggtgtccctgcttccatcagggcaaggagtatgcccctggagaaacagtgaagattggctgcaacacttgtgtctgtcgggaccggaagtggaactgcacagaccatgtgtgtgatgccacgtgctccacgatcggcatggcccactacctcaccttcgacgggctcaaatacctgttccccggggagtgccagtacgttctggtgcaggattactgcggcagtaaccctgggacctttcggatcctagtggggaataagggatgcagccacccctcagtgaaatgcaagaaacgggtcaccatcctggtggagggaggagagattgagctgtttgacggggaggtgaatgtgaagaggcccatgaaggatgagactcactttgaggtggtggagtctggccggtacatcattctgctgctgggcaaagccctctccgtggtctgggaccgccacctgagcatctccgtggtcctgaagcagacataccaggagaaagtgtgtggcctgtgtgggaattttgatggcatccagaacaatgacctcaccagcagcaacctccaagtggaggaagaccctgtggactttgggaactcctggaaagtgagctcgcagtgtgctgacaccagaaaagtgcctctggactcatcccctgccacctgccataacaacatcatgaagcagacgatggtggattcctcctgtagaatccttaccagtgacgtcttccaggactgcaacaagctggtggaccccgagccatatctggatgtctgcatttacgacacctgctcctgtgagtccattggggactgcgccgcattctgcgacaccattgctgcctatgcccacgtgtgtgcccagcatggcaaggtggtgacctggaggacggccacattgtgcccccagagctgcgaggagaggaatctccgggagaacgggtatgaggctgagtggcgctataacagctgtgcacctgcctgtcaagtcacgtgtcagcaccctgagccactggcctgccctgtgcagtgtgtggagggctgccatgcccactgccctccagggaaaatcctggatgagcttttgcagacctgcgttgaccctgaagactgtccagtgtgtgaggtggctggccggcgttttgcctcaggaaagaaagtcaccttgaatcccagtgaccctgagcactgccagatttgccactgtgatgttgtcaacctcacctgtgaagcctgccaggagccgatatcgggcgcgccaacatcagagagcgccacccctgaaagtggtcccgggagcgagccagccacatctgggtcggaaacgccaggcacaagtgagtctgcaactcccgagtccggacctggctccgagcctgccactagcggctccgagactccgggaacttccgagagcgctacaccagaaagcggacccggaaccagtaccgaacctagcgagggctctgctccgggcagcccagccggctctcctacatccacggaggagggcacttccgaatccgccaccccggagtcagggccaggatctgaacccgctacctcaggcagtgagacgccaggaacgagcgagtccgctacaccggagagtgggccagggagccctgctggatctcctacgtccactgaggaagggtcaccagcgggctcgcccaccagcactgaagaaggtgcctcgatatctgacaagaacactggtgattattacgaggacagttatgaagatatttcagcatacttgctgagtaaaaacaatgccattgaaccaagaagcttctctgacaaaactcacacatgcccaccgtgcccagctccagaactcctgggcggaccgtcagtcttcctcttccccccaaaacccaaggacaccctcatgatctcccggacccctgaggtcacatgcgtggtggtggacgtgagccacgaagaccctgaggtcaagttcaactggtacgtggacggcgtggaggtgcataatgccaagacaaagccgcgggaggagcagtacaacagcacgtaccgtgtggtcagcgtcctcaccgtcctgcaccaggactggctgaatggcaaggagtacaagtgcaaggtctccaacaaagccctcccagcccccatcgagaaaaccatctccaaagccaaagggcagccccgagaaccacaggtgtacaccctgcccccatcccgggatgagctgaccaagaaccaggtcagcctgacctgcctggtcaaaggcttctatcccagcgacatcgccgtggagtgggagagcaatgggcagccggagaacaactacaagaccacgcctcccgtgttggactccgacggctccttcttcctctacagcaagctcaccgtggacaagagcaggtggcagcaggggaacgtcttctcatgctccgtgatgcatgaggctctgcacaaccactacacgcagaagagcctctccctgtctccgggtaaatga

SEQ ID NO: 197 - protein, 1652 aa, Artificial Sequence
  pSYN VWF059 (VWF D'D3-Fc with LVPR thrombin site in the linker)
MIPARFAGVLLALALILPGTLCAEGTRGRSSTARCSLFGSDFVNTFDGSMYSFAGYCSYLLAGGCQKRSFSIIGDFQNGKRVSLSVYLGEFFDIHLFVNGTVTQGDQRVSMPYASKGLYLETEAGYYKLSGEAYGFVARIDGSGNFQVLLSDRYFNKTCGLCGNFNIFAEDDFMTQEGTLTSDPYDFANSWALSSGEQWCERASPPSSSCNISSGEMQKGLWEQCQLLKSTSVFARCHPLVDPEPFVALCEKTLCECAGGLECACPALLEYARTCAQEGMVLYGWTDHSACSPVCPAGMEYRQCVSPCARTCQSLHINEMCQERCVDGCSCPEGQLLDEGLCVESTECPCVHSGKRYPPGTSLSRDCNTCICRNSQWICSNEECPGECLVTGQSHFKSFDNRYFTFSGICQYLLARDCQDHSFSIVIETVQCADDRDAVCTRSVTVRLPGLHNSLVKLKHGAGVAMDGQDIQLPLLKGDLRIQHTVTASVRLSYGEDLQMDWDGRGRLLVKLSPVYAGKTCGLCGNYNGNQGDDFLTPSGLAEPRVEDFGNAWKLHGDCQDLQKQHSDPCALNPRMTRFSEEACAVLTSPTFEACHRAVSPLPYLRNCRYDVCSCSDGRECLCGALASYAAACAGRGVRVAWREPGRCELNCPKGQVYLQCGTPCNLTCRSLSYPDEECNEACLEGCFCPPGLYMDERGDCVPKAQCPCYYDGEIFQPEDIFSDHHTMCYCEDGFMHCTMSGVPGSLLPDAVLSSPLSHRSKRSLSCRPPMVKLVCPADNLRAEGLECTKTCQNYDLECMSMGCVSGCLCPPGMVRHENRCVALERCPCFHQGKEYAPGETVKIGCNTCVCRDRKWNCTDHVCDATCSTIGMAHYLTFDGLKYLFPGECQYVLVQDYCGSNPGTFRILVGNKGCSHPSVKCKKRVTILVEGGEIELFDGEVNVKRPMKDETHFEVVESGRYIILLLGKALSVVWDRHLSISVVLKQTYQEKVCGLCGNFDGIQNNDLTSSNLQVEEDPVDFGNSWKVSSQCADTRKVPLDSSPATCHNNIMKQTMVDSSCRILTSDVFQDCNKLVDPEPYLDVCIYDTCSCESIGDCAAFCDTIAAYAHVCAQHGKVVTWRTATLCPQSCEERNLRENGYEAEWRYNSCAPACQVTCQHPEPLACPVQCVEGCHAHCPPGKILDELLQTCVDPEDCPVCEVAGRRFASGKKVTLNPSDPEHCQICHCDVVNLTCEACQEPISGAPTSESATPESGPGSEPATSGSETPGTSESATPESGPGSEPATSGSETPGTSESATPESGPGTSTEPSEGSAPGSPAGSPTSTEEGTSESATPESGPGSEPATSGSETPGTSESATPESGPGSPAGSPTSTEEGSPAGSPTSTEEGASISDKNTGDYYEDSYEDISAYLLSKNNAIEPRSFSDKTHTCPPCPAPELLGGPSVFLFPPKPKDTLMISRTPEVTCVVVDVSHEDPEVKFNWYVDGVEVHNAKTKPREEQYNSTYRVVSVLTVLHQDWLNGKEYKCKVSNKALPAPIEKTISKAKGQPREPQVYTLPPSRDELTKNQVSLTCLVKGFYPSDIAVEWESNGQPENNYKTTPPVLDSDGSFFLYSKLTVDKSRWQQGNVFSCSVMHEALHNHYTQKSLSLSPGK

SEQ ID NO: 198 - DNA, 4860 bp, Artificial Sequence
  pSYN VWF062 (VWF D'D3-Fc with no thrombin site in the linker)
atgattcctgccagatttgccggggtgctgcttgctctggccctcattttgccagggaccctttgtgcagaaggaactcgcggcaggtcatccacggcccgatgcagccttttcggaagtgacttcgtcaacacctttgatgggagcatgtacagctttgcgggatactgcagttacctcctggcagggggctgccagaaacgctccttctcgattattggggacttccagaatggcaagagagtgagcctctccgtgtatcttggggaattttttgacatccatttgtttgtcaatggtaccgtgacacagggggaccaaagagtctccatgccctatgcctccaaagggctgtatctagaaactgaggctgggtactacaagctgtccggtgaggcctatggctttgtggccaggatcgatggcagcggcaactttcaagtcctgctgtcagacagatacttcaacaagacctgcgggctgtgtggcaactttaacatctttgctgaagatgactttatgacccaagaagggaccttgacctcggacccttatgactttgccaactcatgggctctgagcagtggagaacagtggtgtgaacgggcatctcctcccagcagctcatgcaacatctcctctggggaaatgcagaagggcctgtgggagcagtgccagcttctgaagagcacctcggtgtttgcccgctgccaccctctggtggaccccgagccttttgtggccctgtgtgagaagactttgtgtgagtgtgctggggggctggagtgcgcctgccctgccctcctggagtacgcccggacctgtgcccaggagggaatggtgctgtacggctggaccgaccacagcgcgtgcagcccagtgtgccctgctggtatggagtataggcagtgtgtgtccccttgcgccaggacctgccagagcctgcacatcaatgaaatgtgtcaggagcgatgcgtggatggctgcagctgccctgagggacagctcctggatgaaggcctctgcgtggagagcaccgagtgtccctgcgtgcattccggaaagcgctaccctcccggcacctccctctctcgagactgcaacacctgcatttgccgaaacagccagtggatctgcagcaatgaagaatgtccaggggagtgccttgtcactggtcaatcccacttcaagagctttgacaacagatacttcaccttcagtgggatctgccagtacctgctggcccgggattgccaggaccactccttctccattgtcattgagactgtccagtgtgctgatgaccgcgacgctgtgtgcacccgctccgtcaccgtccggctgcctggcctgcacaacagccttgtgaaactgaagcatggggcaggagttgccatggatggccaggacatccagctccccctcctgaaaggtgacctccgcatccagcatacagtgacggcctccgtgcgcctcagctacggggaggacctgcagatggactgggatggccgcgggaggctgctggtgaagctgtcccccgtctatgccgggaagacctgcggcctgtgtgggaattacaatggcaaccagggcgacgacttccttaccccctctgggctggcggagccccgggtggaggacttcgggaacgcctggaagctgcacggggactgccaggacctgcagaagcagcacagcgatccctgcgccctcaacccgcgcatgaccaggttctccgaggaggcgtgcgcggtcctgacgtcccccacattcgaggcctgccatcgtgccgtcagcccgctgccctacctgcggaactgccgctacgacgtgtgctcctgctcggacggccgcgagtgcctgtgcggcgccctggccagctatgccgcggcctgcgcggggagaggcgtgcgcgtcgcgtggcgcgagccaggccgctgtgagctgaactgcccgaaaggccaggtgtacctgcagtgcgggaccccctgcaacctgacctgccgctctctctcttacccggatgaggaatgcaatgaggcctgcctggagggctgcttctgccccccagggctctacatggatgagaggggggactgcgtgcccaaggcccagtgcccctgttactatgacggtgagatcttccagccagaagacatcttctcagaccatcacaccatgtgctactgtgaggatggcttcatgcactgtaccatgagtggagtccccggaagcttgctgcctgacgctgtcctcagcagtcccctgtctcatcgcagcaaaaggagcctatcctgtcggccccccatggtcaagctggtgtgtcccgctgacaacctgcgggctgaagggctcgagtgtaccaaaacgtgccagaactatgacctggagtgcatgagcatgggctgtgtctctggctgcctctgccccccgggcatggtccggcatgagaacagatgtgtggccctggaaaggtgtccctgcttccatcagggcaaggagtatgcccctggagaaacagtgaagattggctgcaacacttgtgtctgtcgggaccggaagtggaactgcacagaccatgtgtgtgatgccacgtgctccacgatcggcatggcccactacctcaccttcgacgggctcaaatacctgttccccggggagtgccagtacgttctggtgcaggattactgcggcagtaaccctgggacctttcggatcctagtggggaataagggatgcagccacccctcagtgaaatgcaagaaacgggtcaccatcctggtggagggaggagagattgagctgtttgacggggaggtgaatgtgaagaggcccatgaaggatgagactcactttgaggtggtggagtctggccggtacatcattctgctgctgggcaaagccctctccgtggtctgggaccgccacctgagcatctccgtggtcctgaagcagacataccaggagaaagtgtgtggcctgtgtgggaattttgatggcatccagaacaatgacctcaccagcagcaacctccaagtggaggaagaccctgtggactttgggaactcctggaaagtgagctcgcagtgtgctgacaccagaaaagtgcctctggactcatcccctgccacctgccataacaacatcatgaagcagacgatggtggattcctcctgtagaatccttaccagtgacgtcttccaggactgcaacaagctggtggaccccgagccatatctggatgtctgcatttacgacacctgctcctgtgagtccattggggactgcgccgcattctgcgacaccattgctgcctatgcccacgtgtgtgcccagcatggcaaggtggtgacctggaggacggccacattgtgcccccagagctgcgaggagaggaatctccgggagaacgggtatgaggctgagtggcgctataacagctgtgcacctgcctgtcaagtcacgtgtcagcaccctgagccactggcctgccctgtgcagtgtgtggagggctgccatgcccactgccctccagggaaaatcctggatgagcttttgcagacctgcgttgaccctgaagactgtccagtgtgtgaggtggctggccggcgttttgcctcaggaaagaaagtcaccttgaatcccagtgaccctgagcactgccagatttgccactgtgatgttgtcaacctcacctgtgaagcctgccaggagccgatatcgggcgcgccaacatcagagagcgccacccctgaaagtggtcccgggagcgagccagccacatctgggtcggaaacgccaggcacaagtgagtctgcaactcccgagtccggacctggctccgagcctgccactagcggctccgagactccgggaacttccgagagcgctacaccagaaagcggacccggaaccagtaccgaacctagcgagggctctgctccgggcagcccagccggctctcctacatccacggaggagggcacttccgaatccgccaccccggagtcagggccaggatctgaacccgctacctcaggcagtgagacgccaggaacgagcgagtccgctacaccggagagtgggccagggagccctgctggatctcctacgtccactgaggaagggtcaccagcgggctcgcccaccagcactgaagaaggtgcctcgagcgacaaaactcacacatgcccaccgtgcccagctccagaactcctgggcggaccgtcagtcttcctcttccccccaaaacccaaggacaccctcatgatctcccggacccctgaggtcacatgcgtggtggtggacgtgagccacgaagaccctgaggtcaagttcaactggtacgtggacggcgtggaggtgcataatgccaagacaaagccgcgggaggagcagtacaacagcacgtaccgtgtggtcagcgtcctcaccgtcctgcaccaggactggctgaatggcaaggagtacaagtgcaaggtctccaacaaagccctcccagcccccatcgagaaaaccatctccaaagccaaagggcagccccgagaaccacaggtgtacaccctgcccccatcccgggatgagctgaccaagaaccaggtcagcctgacctgcctggtcaaaggcttctatcccagcgacatcgccgtggagtgggagagcaatgggcagccggagaacaactacaagaccacgcctcccgtgttggactccgacggctccttcttcctctacagcaagctcaccgtggacaagagcaggtggcagcaggggaacgtcttctcatgctccgtgatgcatgaggctctgcacaaccactacacgcagaagagcctctccctgtctccgggtaaatga

SEQ ID NO: 199 - protein, 1619 aa, Artificial Sequence
  pSYN VWF062 (VWF D'D3-Fc with no thrombin site in the linker)
MIPARFAGVLLALALILPGTLCAEGTRGRSSTARCSLFGSDFVNTFDGSMYSFAGYCSYLLAGGCQKRSFSIIGDFQNGKRVSLSVYLGEFFDIHLFVNGTVTQGDQRVSMPYASKGLYLETEAGYYKLSGEAYGFVARIDGSGNFQVLLSDRYFNKTCGLCGNFNIFAEDDFMTQEGTLTSDPYDFANSWALSSGEQWCERASPPSSSCNISSGEMQKGLWEQCQLLKSTSVFARCHPLVDPEPFVALCEKTLCECAGGLECACPALLEYARTCAQEGMVLYGWTDHSACSPVCPAGMEYRQCVSPCARTCQSLHINEMCQERCVDGCSCPEGQLLDEGLCVESTECPCVHSGKRYPPGTSLSRDCNTCICRNSQWICSNEECPGECLVTGQSHFKSFDNRYFTFSGICQYLLARDCQDHSFSIVIETVQCADDRDAVCTRSVTVRLPGLHNSLVKLKHGAGVAMDGQDIQLPLLKGDLRIQHTVTASVRLSYGEDLQMDWDGRGRLLVKLSPVYAGKTCGLCGNYNGNQGDDFLTPSGLAEPRVEDFGNAWKLHGDCQDLQKQHSDPCALNPRMTRFSEEACAVLTSPTFEACHRAVSPLPYLRNCRYDVCSCSDGRECLCGALASYAAACAGRGVRVAWREPGRCELNCPKGQVYLQCGTPCNLTCRSLSYPDEECNEACLEGCFCPPGLYMDERGDCVPKAQCPCYYDGEIFQPEDIFSDHHTMCYCEDGFMHCTMSGVPGSLLPDAVLSSPLSHRSKRSLSCRPPMVKLVCPADNLRAEGLECTKTCQNYDLECMSMGCVSGCLCPPGMVRHENRCVALERCPCFHQGKEYAPGETVKIGCNTCVCRDRKWNCTDHVCDATCSTIGMAHYLTFDGLKYLFPGECQYVLVQDYCGSNPGTFRILVGNKGCSHPSVKCKKRVTILVEGGEIELFDGEVNVKRPMKDETHFEVVESGRYIILLLGKALSVVWDRHLSISVVLKQTYQEKVCGLCGNFDGIQNNDLTSSNLQVEEDPVDFGNSWKVSSQCADTRKVPLDSSPATCHNNIMKQTMVDSSCRILTSDVFQDCNKLVDPEPYLDVCIYDTCSCESIGDCAAFCDTIAAYAHVCAQHGKVVTWRTATLCPQSCEERNLRENGYEAEWRYNSCAPACQVTCQHPEPLACPVQCVEGCHAHCPPGKILDELLQTCVDPEDCPVCEVAGRRFASGKKVTLNPSDPEHCQICHCDVVNLTCEACQEPISGAPTSESATPESGPGSEPATSGSETPGTSESATPESGPGSEPATSGSETPGTSESATPESGPGTSTEPSEGSAPGSPAGSPTSTEEGTSESATPESGPGSEPATSGSETPGTSESATPESGPGSPAGSPTSTEEGSPAGSPTSTEEGASSDKTHTCPPCPAPELLGGPSVFLFPPKPKDTLMISRTPEVTCVVVDVSHEDPEVKFNWYVDGVEVHNAKTKPREEQYNSTYRVVSVLTVLHQDWLNGKEYKCKVSNKALPAPIEKTISKAKGQPREPQVYTLPPSRDELTKNQVSLTCLVKGFYPSDIAVEWESNGQPENNYKTTPPVLDSDGSFFLYSKLTVDKSRWQQGNVFSCSVMHEALHNHYTQKSLSLSPGK

SEQ ID NO: 200 - protein, 4 aa, Artificial Sequence
  Cleavable linker
IEPR
